(19) United States
(12) Patent Application Publication
(10) Pub. No.: US 2002/0138882 A1
(43) Pub. Date: Sep. 26, 2002

(54) Polynucleotides encoding proteins involved in plant metabolism

(76) Inventors: Rebecca E. Cahoon, Wilmington, DE (US); Hajime Sakai, Newark, DE (US); Xiping Niu, Johnston, IA (US)

Correspondence Address: E I DU PONT DE NEMOURS AND COMPANY, LEGAL PATENT RECORDS CENTER, BARLEY MILL PLAZA 25/1128, 4417 LANCASTER PIKE, WILMINGTON, DE, 19805, US

(21) Appl. No.: 10/062,254

(22) Filed: Feb. 1, 2002

Related U.S. Application Data
(63) Continuation of application No. 09/630,346, filed on Jul. 28, 2000.
(60) Provisional application No. 60/146,511, filed on Jul. 30, 1999.
(60) Provisional application No. 60/156,006, filed on Sep. 23, 1999.
(60) Provisional application No. 60/156,899, filed on Sep. 30, 1999.
(60) Provisional application No. 60/157,287, filed on Oct. 1, 1999.
(60) Provisional application No. 60/169,767, filed on Dec. 9, 1999.
(60) Provisional application No. 60/171,054, filed on Dec. 16, 1999.
(60) Provisional application No. 60/172,958, filed on Dec. 21, 1999.
(60) Provisional application No. 60/171,515, filed on Dec. 22, 1999.
(60) Provisional application No. 60/173,535, filed on Dec. 29, 1999.

(51) Int. Cl. C12N 15/82; C12N 15/87; C12N 15/09; C12N 15/63; C12N 15/29; C12N 5/04; C12N 5/10; A01H 5/00; A01H 5/10; C07K 1/00; C07K 14/00

(52) U.S. Cl. 800/320.1; 536/23.6; 435/320.1; 435/419; 435/468; 800/298; 800/278; 530/350; 708/100

(57) ABSTRACT

The invention provides isolated pyruvate dehydrogenase kinase nucleic acids and their encoded polypeptides. The present invention provides methods and compositions relating to altering pyruvate dehydrogenase kinase levels in plants. The invention further provides recombinant expression cassettes, host cells, transgenic plants, and antibody compositions.

[0001] This application claims priority to U.S. Provisional Application Nos. 60/146511, filed Jul. 30, 1999; 60/156006, filed Sep. 23, 1999; 60/156899, filed Sep. 30, 1999; 60/157287, filed Oct. 1, 1999; 60/169767, filed Dec. 9, 1999; 60/171054, filed Dec. 16, 1999; 60/172958, filed Dec. 21, 1999; 60/171515, filed Dec. 22, 1999; and 60/173535, filed Dec. 29, 1999, all of which are incorporated herein by reference.

### TECHNICAL FIELD

[0002] The present invention relates generally to plant molecular biology. More specifically, it relates to nucleic acid sequences, the amino acids sequences encoded by such nucleic acids, and methods for modulating their expression in plants.

### BACKGROUND OF THE INVENTION

[0003] Pyruvate Dehydrogenase Kinase (PDK)

[0004] Manipulating major cellular processes at individual key regulatory points may provide a relatively simple means to affect several phenotypes. Respiration and lipid biosynthesis for example may be simultaneously modified by altering levels of acetyl-CoA which both serve as entry point into the Krebs cycle as well as primary substrate for fatty acid biosynthesis. Increased respiration may be manifested in an increase in seed growth as in soybean (Sinclair et al. (1987) Plant Physiol 83:467-468) whereas decreased respiration may lead to decreased reproductive growth (Gale (1974) J Exp Bot 25:987-989).

[0005] The pyruvate dehydrogenase enzyme complex catalyzes the oxidative phosphorylation of pyruvate into acetyl-CoA. The multienzyme complex is composed of many different enzymes that catalyze different reactions in forming acetyl-CoA. Pyruvate dehydrogenase (E1) is a thiamine pyrophosphate (TPP)-requiring enzyme that decarboxylates pyruvate with the formation of hydroxyethyl-TPP. The hydroxyethyl group attacks the disulfide bond of the lipoamide moiety of the second enzyme, dihydrolipoyl transacetylase (E2) to form acetyl-dihydrolipoamide-E2 and regenerate E1. E2 then catalyzes the transfer of the acetyl group to CoA, forming acetyl-CoA and dihydro-lipoamide-E2. Dihydrolipoyl dehydrogenase (E3) via its flavin adenine dinucleotide (FAD) group oxidizes the dihydrolipoamide moiety linked to E2, regenerating lipoamide-E2. Reduced E3 is then reoxidized by NAD+, forming NADH. In eukaryotes, the complex is composed of 30 E1 dimers and 6 E3 dimers around a core of 60 E2 monomers arranged in a dodecahedron.

[0006] One mechanism of regulating pyruvate dehydrogenase activity is its phosphorylation state. The enzyme pyruvate dehydrogenase kinase or PDK inactivates the E1subunit by catalyzing the phosphorylation of a specific E1Ser residue using ATP. Hydrolysis of this phospho-Ser residue by the pyruvate dehydrogenase phosphatase reactivates the complex. This form of regulation operates only in mitochondria and not in chloroplasts. Suppressing pyruvate dehydrogenase activity may therefore lead to increased mitochondrial pyruvate dehydrogenase activity leading to increased respiration and fatty acid and hence oil biosynthesis. Suppression of pyruvate dehydrogenase kinase activity may be accomplished by downregulating expression of genes encoding pyruvate dehydrogenase kinase by technology well known to those skilled in the art which include antisense inhibition and cosuppression. Indeed, WO 98/35044 describes transgenic Arabidopsis thaliana plants transformed with antisense constructs of the Arabidopsis pyruvate dehydrogenase kinase gene as having increased pyruvate dehydrogenase activity, increased activity of enzymes involved in the Krebs cycle, increased overall oil content, and shorter flowering time as brought about by increased respiration, without any apparent deleterious effects. Nucleic acid fragments encoding pyruvate dehydrogenase kinase have also been isolated from maize (Thelen et al. (1998) J Biol Chem 273:26618-26623) The domains responsible for catalysis and recognition and binding of substrates remain to be defined. Accordingly, the availability of nucleic acid sequences encoding all or a portion of pyruvate dehydrogenase kinase would facilitate studies that address these issues and could provide genetic tools to enhance or otherwise alter the accumulation of carbohydrates, lipids and proteins in plants and seeds.

[0007] Dihydrolipoamide Dehydrogenase

[0008] Carbon flux in living organisms is governed by intricate metabolic pathways linked together by regulatory mechanisms that take their cue from a variety of signals including but not limited to the environment, the developmental stage, genetics, and physiology. It is becoming common practice to alter acummulation of certain metabolites by manipulating expression of a key enzyme in the relevant pathway. For example, U.S. Pat. No. 5,773,691 describes a method of increasing the lysine content of seeds by overexpressing in a seed-specific manner a gene encoding the enzyme dihydrodipicolinic acid synthase, a major regulatory point in lysine biosynthesis.

[0009] An enzyme that is part of a number of several metabolic pathways is dihydrolipoamide dehydrogenase. Dihydrolipoamide dehydrogenase is a flavoprotein that catalyzes the oxidation of dihydrolipoyl moieties of noncovalently associated proteins in multienzyme complexes including the pyruvate dehydrogenase complex, α-ketoglutarate dehydrogenase complex, and branched-chain α-ketoacid dehydrogenase complex, where it is referred to as the E3 component, because it is the third enzyme in the reaction mechanism. Dihydrolipoamide dehydrogenase has also been shown to be a component of the glycine cleavage system,where it is referred to as the L protein. These E3-dependent enzyme complexes catalyze key regulatory reactions in intermediary metabolism, including plant leaf respiration. In plants, the plastid form of the pyruvate dehydrogenase complex provides acetyl-CoA and NADH for fatty acid biosynthesis. The importance of this enzyme is demonstrated by the fact that mice that have both copies of the gene encoding dihydrolipoamide dehydrogenase inactivated die prenatally (Johnson et al. (1997) Proc Natl Acad Sci USA 94:14512-14517).

[0010] Genes encoding dihydrolipoamide dehydrogenase have been isolated from prokaryotes (Stephens et al. (1983) Eur J Biochem 135:519-527), yeast (Ross et al. (1988) J Gen Microbiol 134:1131-1139) and animals (Johnson et al. (1997) Genomics 41:320-326). A gene encoding the mitochondrial enzyme in pea leaves has been isolated. It is believed that a single nuclear gene encodes the same mitochondrial dihydrolipoamide dehydrogenase in the pyruvate dehydrogenase and glycine decarboxylase complexes (Turner et al (1992) J Biol Chem 267:7745-7750; Bourguignon et al. (1996) Biochem J313:229-234). The plastidic counterpart has been biochemically characterized, and appears to be distinct from the mitochondrial enzyme. They appear to share limited sequence similarity, and antibodies to the mitochondrial enzyme did not readily cross-react with its plastidic counterpart (Conner et al. (1996) Planta 200:195-202). The gene encoding the plastidic dihydrolipoamide dehydrogenase remains to be isolated. Accordingly, the availability of nucleic acid sequences encoding novel amino acid sequences of dihydrolipoamide dehydrogenase would facilitate studies to better understand carbon flux in plants and could provide genetic tools to enhance or otherwise alter the accumulation of particular metabolites like fatty acids during plant growth and development.

[0011] Steroid dehydrogenase

[0012] Steroids constitute an integral component of plant membranes. They decrease fluidity and probably are involved in the adaptation of membranes to temperature. More recently, the importance of steroids as plant hormones has been the subject of intense study, stemming from the discovery that Arabidopsis de-etiolated (det2) and the constitutive photomorphogenesis and dwarfism (cpd) mutants are defective in the synthesis of brassinosteroids (Li et al. (1996) Science 272:398-401; Szekeres et al. (1996) Cell 85:171-182).

[0013] Structurally similar to animal steroids, brassinosteroids have been shown to elicit a broad spectrum of responses including stem elongation, inhibition of root growth, repression of stress-regulated genes, pollen-tube growth and xylem differentiation (Rouleau et al. (1999) J Biol Chem 274:20925-20930; Schumacher and Chory (2000) Curr Opin Plant Biol 3:79-84).

[0014] 3-beta-hydroxy-delta(5)-steroid dehydrogenase (EC 1.1.1.145) is also called progesterone reductase. It is an oxidoreductase which acts on the CH—OH group of donors with NAD+ or NADP+ as acceptors in the C-21 steroid metabolism and the androgen and estrogen metabolisms. The enzyme converts 3 beta hydroxy-5-ene-steroids into 3-keto-4-ene derivatives and interconvers 3 beta-hydroxy and 3-keto-5 alpha-androstane steroids (Labrie et al. (1992) J. Steroid Biochem. Mol. Biol. 41:421-435). This enzyme is essential for the biosynthesis of all active steroid hormones (Payne et al. (1997) Steroids 62:169-175). Levels of steroid dehydrogenases may therefore be altered to control steroid hormone biosynthesis and responses in living matter, including enhanced biomass production as seen in transgenic plants overexpressing DET2.

[0015] Plant Homologs of Yeast RFT1

[0016] Cells divide by duplicating their chromosomes and segregating one copy of each duplicated chromosome, as well as providing essential organelles, to each of two daughter cells. Regulation of cell division is critical for the normal development of multicellular organisms. A cell that is destined to grow and divide must pass through specific phases of a cell cycle: G₁, S (period of DNA synthesis), G₂, and M (mitosis). Studies have shown that cell division is controlled via the regulation of two critical events during the cell cycle: initiation of DNA synthesis and the initiation of mitosis. Several kinase proteins control cell cycle progression through these events. These protein kinases are heterodimeric proteins, having a cyclin-dependent kinase (Cdk) subunit and a cyclin subunit that provides the regulatory specificity to the heterodimeric protein. These heterodimeric proteins regulate cell cycle by interacting with proteins involved in the initiation of DNA synthesis and mitosis and phosphorylating them at specific regulatory sites, activating some and inactivating others. The cyclin subunit concentration varies in phase with cell cycle while the concentration of the Cdks remain relatively constant throughout the cell cycle.

[0017] Cells with damaged DNA become arrested in G1 and G2 while the damage is repaired. The p53 protein is involved in this inhibition. The p53 protein is a trans-activator protein that acts to regulate cellular division by controlling a set of genes required for this process (Koerty et al. (1995) J. Biol. Chem. 270(38):22556-22564). Upon DNA damage p53 concentrations increase which stimulates the expression of a cyclin-dependent kinase inhibitor (Kasiae et al. (1991) Cell 71:587-597). This protein inhibits the activity of G1 Cdk-cyclin complexes which in turn inhibits cell cycle progression (Hollstein et al (1991) Science 253:49-53 and Koerty et al. (1995) J. Biol. Chem. 270(38):22556-22564).

[0018] The p53 gene is under intense investigation by many labs involved in mammalian cell biology, however p53 homologues have not been identified in plants. In yeast, mutations in the RFT1 gene result in defective cell cycle progression. Recent genetic and biochemical studies indicate that wild type human p53 can suppress RFT1 mutations and that the RFT1 gene product interacts physically with p53. The work suggests that the RFT1 protein may represent a novel p53 binding factor yet to be identified from mammalian cells (Koerty et al. (1995) J. Biol. Chem. 270(38):22556-22564).

[0019] There is a great deal of interest in identifying the genes that encode cell cycle regulatory proteins including p53-associated proteins in plants. These genes may be used to express cell cycle regulatory proteins in plant cells to control cell cycle, modulate cell division and possibly enhance cell tissue culture growth. Accordingly, the availability of nucleic acid sequences encoding all or a portion of a cell cycle regulatory protein would facilitate studies to better understand cell cycle regulation in plants, provide genetic tools to enhance cell growth in tissue culture. Cell cycle regulatory proteins may also provide targets to facilitate design and/or identification of inhibitors of cell cycle regulatory proteins that may be useful as herbicides.

[0020] Phosphoinositide Binding Proteins

[0021] Phosphatidylinositol transfer proteins (PITPs) belong to a broad class of lipid transfer proteins that are able to transfer lipids between membranes in vitro. Specifically, PITPs are able to transfer phosphatidylinositol and in some cases phosphatidylcholine (PC). They have been described in microorganisms, animals, and plants. Interestingly, PITPs diverge in amino acid sequence. The PITP encoded by SEC14 in Saccharomyces cerevisiae does not have sequence similarity with the mammalian PITPs, and show only limited homology with the soybean and Arabidopsis PITPs. PITPs from different organisms may substitute for one another in vitro assays or in complementation studies but appear to vary in biological function. For example, the SEC14 gene product in Saccharomyces cerevisiae is essential for surivival, involved in protein exit from the yeast Golgi complex. It regulates the nucleotide pathway of PC biosynthesis by binding PC when PC level in the membrane is high resulting in the inhibition of CTP cytidylyltransferase, an enzyme in PC biosynthesis in yeast Golgi membranes. This maintains a critical diacylglycerol pool required for Golgi secretory function. Meanwhile, the SEC14 protein in the dimorphic yeast Yarrowia lipolytica is not essential for viability but required for differentiation to the mycelial form but does not appear to play a role in PC biosynthesis (Lopez et al. (1994) J Cell Biol 125:113-127). In mammalian systems, PITP has been shown to be required for epidermal growth factor signalling (Kauffmann-Zeh, et al. (1995) Science 268:1188-1190) and to participate in secretory vesicle formation (Ohashi et al. (1995) Nature 377:544-547).

[0022] Plant PITPs have been studied in less detail. More recently, two soybean proteins, Ssh1p and Ssh2p that have been identified by their ability to rescue PITP-deficient Saccharomyces cerevisiae strains were shown to exhibit biochemical properties different from those of known PITPs. Ssh1p has neither PI-transfer activity nor PC-transfer activity, wherease Ssh2p has PI-transfer activity but no accompanying PC-transfer activity. Both however have high affinity to phosphoinositides, unlike SEC14. Moreover, Ssh1p may function as a component of a stress response pathway that leads to protection from osmotic insult (Kearns et al. (1998) EMBO J 17:4004-4017). An Arabidopsis cDNA that complements the sec14 mutation has been isolated and was found to encode a protein that has homology to the SEC14 protein. The encoded protein has been shown capable of transferring PI but not PC, like Ssh2p. Its biological role remains to be determined (Jouannic et al. (1998) Eur J Biochem 258:402-410).

[0023] Isolation of more plant phospholipid transfer proteins and phospholipid-binding proteins should allow further characterization of their structure and function, and the generation of transgenic plants that exploit their utility (e.g., engineering transgenic plants with increased tolerance to abiotic stress or with more efficient lipid and/or protein transport using these proteins).

[0024] Peroxisomal Lipid Transfer Proteins

[0025] Peroxisomes are spherical cell organelles delimited by a unit membrane where metabolic pathways that produce toxic metabolites are localized, thus preventing the spread of harmful substances in the cell. The β-oxidation pathway of lipid catabolism and photorespiration both occur in peroxisomes. During the conversion of fatty acids to succinate via β-oxidation, hydrogen peroxide and glyoxylate are generated. During photorespiration, phosphoglycolate that is produced from oxidation of ribulose1,5-bisphosphate is dephosphorylated, and then transported to peroxisomes where it is further oxidized to hydrogen peroxide and glyoxylate. In the peroxisome, hydrogen peroxide is neutralized by catalase, while glyoxylate is transamidated to produce glycine. The lethality of genetic disorders such as Zellweger syndrome in humans wherein peroxisomes fail to assemble underscores the importance of peroxisomes. Zellweger patients have impaired plasmalogen and bile acid synthesis, and catabolize phytanic acid and very long fatty acids.

[0026] Lipid transfer proteins in peroxisomes have not been examined in much detail. Peroxisomal nonspecific lipid transfer proteins are small basic polypeptides that are able to transfer phospholipids and sterols between membranes in vitro. Consequently, they are believed to facilitate movement of said molecules within cells. Genes encoding these proteins have been isolated from fungi and animals, but not yet from plants. In Candida tropicalis, a novel peroxisomal nonspecific lipid transfer protein is thought to have a role in regulating β-oxidation (Tan et al. (1990) Eur J Biochem 190:107-112). A cDNA encoding human nonspecific lipid transfer protein (or sterol carrier protein 2 [SCP₂]) with a peroxisome targeting sequence was shown to enhance progestin synthesis, lending support to the notion that SCP₂ is involved in regulating steroid hormone synthesis (Yamamoto et al. (1991) Proc Natl Acad Sci USA 88:463-467). Overexpressing SCP₂ in rat hepatoma cells resulted in increase in cholesterol content of the plasma membrane, a finding consistent with the proposed function of SCP₂ in the rapid movement of newly synthesized cholesterol to the plasma membrane (Baum et al. (1997) J Biol Chem 272:6490-6498). Less is known about similar proteins in plants. Accordingly, the availability of nucleic acid sequences encoding all or a portion of peroxisome lipid transfer proteins would facilitate studies to better understand the mechanism of peroxisome function as well as lipid transport and the various pathways involving lipids (e.g., β-oxidation pathway) in plant peroxisomes and could provide genetic tools to enhance or otherwise alter the accumulation of macromolecules particularly lipids during plant growth and development.

[0027] RNA Polymerase II Subunit RPB9

[0028] Improvement of crop plants for a variety of traits, including disease and pest resistance, and grain quality improvements such as oil, starch or protein composition, cart be achieved by introducing new or modified genes (transgenes) into the plant genome. Transcriptional activation of genes, including transgenes, is in general controlled by the promoter through a complex set of protein/DNA and protein/protein interactions. Promoters can impart patterns of expression that are either constitutive or limited to specific tissues or times during development.

[0029] In eukaryotic cells, genes encoding messenger RNA are transcribed by RNA polymerase II. Efficient transcription in eukaryotes is dependent upon the interaction of several polypeptides that comprise the basal transcriptional apparatus. Accurate initiation of transcription of class II genes depends upon assembly these peptides into the basal transcriptional complex containing RNA polymerase II and the general transcription factors (GTFs): TFIIA, TFIIB, TFIID, TFIIE, TFIIF, and TFIIH. Additionally, activator, coactivator and repressor proteins interact with the basal apparatus to regulate gene expression.

[0030] RNA polymerase II has long been known to be a large multimeric protein complex. Twelve of the polypeptides in the basal apparatus tightly assemble to form RNA polymerase II. The twelve polypeptides of RNA polymerase are: RPB 1-9, RPB10α, RPB10β and RPB 11. The role of several of these peptides has been elucidated in a number of systems, including humans, Drosophila melanogaster and Saccharomyces cerevisiae. The role of RPB9 in plants is not known.

[0031] RPB9 is a member of the RNA polymerase II complex. In Saccharomyces, it is one of only two subunits of RNA polymerase II not essential for cell viability. Deletion of RPB9 does not prevent formation of RNA polymerase II by the other 11 subunits, however, accurate transcriptional start site selection by RPB9-deficient RNA polymerase II is abrogated, causing transcription to initiate upstream from the correct start site. RPB9 appears to recognize DNA arrest sites and may transmit signals to the elongation ternary complex affecting the efficiency of RNA polymerase II elongation. Genetic analysis in yeast has identified the general transcription factor TFIIB as well as RPB9 as important in accurate transcriptional start site selection. Mutations in RPB9 suppress the downstream shift in start site selection caused by mutations in TFIIB. Thus TFIIB and RPB9 may functionally interact and this interaction may play an important role for efficient and accurate start site selection.

[0032] The instant invention concerns the identification and isolation of RPB9 in plants. The RPB9 subunit of RNA polymerase has been cloned from rice and several RPB9 subunit genes from other plants have been identified and isolated. Because most of the regulation of gene expression in eukaryotes occurs at the level of transcription, isolation of complete RNA polymerase II complexes would facilitate studies to better understand the interplay of the various polypeptides in the basal complex and the mechanisms that control transcription in plants. Thus, RPB9 can be used as a valuable tool to isolate complete RNA polymerase II from plant extracts. It may be possible to use RBP9 to gain an understanding of transcription in plants which will permit us to exploit this process and enhance our ability to manipulate target transgenes of interest in plants.

[0033] Transcription Factor IIA (TFIIA)

[0034] TFIIA is an important component of the basal transcription machinery of RNA polymerase II which is involved in mRNA synthesis. It functions at core promoters by serving to stabilize the interaction between the TATA promoter element with the TATA-binding protein (TBP) component of TFIID, another key component of the basal transcription machinery (Buratowski et al. (1989) Cell 56:549-561; Geiger et al. (1996) Science 272:830-836). TFIIA also appears to have activator-dependent functions, since TFIIA has been shown to interact directly with activators, and that these interactions correlate with the ability to enhance TFIID-TFIIA-promoter ternary complex assembly required for transcription initiation by RNA polymerase II (Kobayashi et al. (1995) Mol Cell Biol 15:6465-6473). Using a yeast strain that contains a TBP defective for interaction with TFIIA, TFIIA activator-dependent and core promoter functions were demonstrated in vivo (Stargell et al. (2000) J Biol Chem 275:12374-12380).

[0035] In yeast, TFIIA is composed of a large subunit of 32 kilodaltons encoded by the TOA1 gene, and a small subunit of 13.5 kilodaltons encoded by the TOA2 gene. Both genes have been cloned and neither shows obvious sequence similarity with each other (Ranish et al. (1992) Science 255:1127-1129). Both TOA1 and TOA2 genes are essential for growth of yeast, indicating the importance of TFIIA.

[0036] Ethylene Responsive Element Binding Protein (EREBP)

[0037] Ethylene induction of transcription of certain ethylene-inducible pathogenesis-related protein genes has been shown to be based on the presence of the GCC box in the promoter, also known as the ethylene-responsive element (ERE), an 11-bp sequence that is able to enhance ethylene-dependent transcription from a truncated 35S promoter of cauliflower mosaic virus (CaMV) (Ohme-Takagi and Shinshi (1995) Plant Cell 7:173-182). cDNAs encoding DNA-binding proteins that specifically bind the GCC box have been isolated, and their protein products designated ERE binding proteins, or EREBPS, are characterized by a DNA-binding domain called the AP2 domain (Okamuro et al. (1997) Proc Natl Acad Sci 94:7076-7081). Although the isolated EREBP genes exhibited different patterns of expression, all were shown to be inducible by ethylene in leaves, suggesting that altering EREBP expression may be a viable strategy to engineer plant response to ethylene, pathogen, and stress.

[0038] AC-rich Binding Factor (ACBF)

[0039] A study of the bean phenylalanine ammonia-lyase (PAL) gene promoter revealed the presence of positive and negative regulatory cis elements, including an AC-rich motif implicated in xylem expression (Seguin et al. (1997) Plant Mol Biol 35:281-291). A factor, named AC-rich binding factor (ACBF) was shown to specifically bind the AC-rich motif. The deduced amino acid sequence of ACBF contained a long repeat of glutamine residues characteristic of previously analyzed transcription factors. A heptamer of the AC-rich sequence was shown to drive xylem-specific expression of a minimal CaMV 35S promoter (Seguin et al. (1997) Plant Mol Biol 35:281-291), suggesting that by modulating ACBF expression, chimeric genes driven by promoter sequences with AC-rich sequence (ACBF binding site) may be expressed at optimal levels in a xylem-specific pattern. Also, ACBF expression levels may be engineered to regulate PAL levels, in the process regulating disease resistance response (since PAL is a key enzyme in the phenylpropanoid pathway which produces several defense-related metabolites) and isoflavone synthesis.

[0040] YABBY Transcription Factors

[0041] Flower development is a complex process fine-tuned to environmental cues that involves transition from vegetative state to reproductive development and the actual differentiation of the floral meristem into the different floral organs at predermined positions. During the past several years, major advances have been made towards defining the process at the molecular level. Several mutants in Arabidopsis, snapdragon, and other plant species with impaired floral development have been characterized, and the corresponding genes cloned, including PLENA (PLE)/AGAMOUS (AG) (Yanofsky et al. (1990) Nature 346:35-39; Bradley et al. (1993) Cell 72:85-95), DEFICIENS (DEF)/APETALA3 (AP3) (Sommer et al. (1990) EMBO J 9:605-613; Jack et al. (1992) Cell 68:683-697), and GLOBOSA (GLO)/PISTILLATA (PI) (Trobner et al. (1992) EMBO J 11:4693-4704; Goto and Meyerowitz (1994) Genes Dev 8:1548-1560). Most of these floral organ identity genes, whose presence or absence of expression determines what a particular whorl of floral organs would develop into, encode transcription factors, indicating a major role of transcriptional regulation in flower development. The above-mentioned genes for example belong to a family that encodes proteins with an amino-terminal DNA-binding and dimerization domain called the MADS domain, after the initials of the first four members of this gene family, MCMI, AG, DEF, and SRF (Schwarz-Sommer et al. (1990) Science 250:931-936).

[0042] Another family of transcription factors involved in floral development and meristem formation is the YABBY gene family, to which the genes FILAMENTOUS FLOWER (FIL) and CRABS CLAW (CRC) belong. These genes specify abaxial cell fate which is incompatible with a meristematic state (Siegfried et al. (1999) Development 126:4117-4128) in above ground lateral organs including leaves and flowers. Fil mutants generate underdeveloped flowers that fail to form receptacles and floral organs, and flowers with altered number and shape of floral organs (Sawa et al. (1999) Genes Dev 13:1079-1088), whereas crc mutants have nectaries that fail to develop and abnormal carpels (Alvarez and Smyth (1999) Development 126:2377-2386). FIL and CRC encode transcription factors containing a zinc finger and a helix-loop-helix similar to the first two helices of the HMG box known to bind DNA (Sawa et al. (1999) Genes Dev 13:1079-1088; Bowman and Smyth (1999) Development 126:2387-2396). FIL expression is restricted to abaxial tissues while CRC expression extends slightly beyond abaxial tissues, being found also in cells adjacent to the presumptive placental positions in developing carpels (Eshed et al. (1999) Cell 99:199-209).

[0043] There is a great deal of interest in identifying the genes that encode transcription factors involved in flower development and meristem formation and activity. These genes may be used to engineer plant development and consequently improve yield. Accordingly, the availability of nucleic acid sequences encoding all or a portion of YABBY transcription factors would facilitate studies to better understand the role of said transcription factors in flower and meristem development, to define their gene targets in the whole process, to reconstruct their evolution and analyze phylogenetic relationships, and could provide genetic tools to enhance plant productivity.

[0044] Plant Multiprotein Bridging Factors

[0045] In eukaryotes transcription initiation requires the action of several proteins acting in concert to initiate mRNA production. Two cis-acting regions of DNA have been identified that bind transcription initiation proteins. The first binding site located approximately 25-30 bp upstream of the transcription initiation site is termed the TATA box. The second region of DNA required for transcription initiation is the upstream activation site (UAS) or enhancer region. This region of DNA is somewhat distal from the TATA box. During transcription initiation RNA polymerase II is directed to the TATA box by general transcription factors. Transcription activators which have both a DNA binding domain and an activation domain bind to the UAS region and stimulate transcription initiation by physically interacting with the general transcription factors and RNA polymerase. Direct physical interactions have been demonstrated between activators and general transcription factors in vitro, such as between the acidic activation domain of herpes simplex virus VP 16 and TATA-binding protein (TBP), TFIIB, or TFIIH (Triezenberg et al. (1988) Gene Dev. 2:718-729; Stringer et al. (1990) Nature 345:783-786; Lin et al. (1991) Nature 353:569-571; Xiao et al. (1994) Mol. Cell. Biol. 14:7013-7024).

[0046] A third factor that is involved in transcription initiation is the coactivator protein. It is thought that coactivator proteins serve to mediate the interaction between transcriptional activators and general transcription factors. Functional and physical interactions have also been demonstrated between the activators and various transcription coactivators. These transcription coactivators normally can not bind to DNA directly, however they can “bridge” the interaction between transcription activators and general transcription factors (Pugh and Tjian (1990) Cell 61:1187-1197; Kelleher et al. (1990) Cell 61:1209-1215; Berger et al. (1990) Cell 61:1199-1208). One such “bridging” protein identified in Drosophila is the multiprotein bridging factor 1 (MBF1) transcriptional cofactor (Takemaru et al., (1997) PNAS 94(14):7251-7256). This protein has been shown to act as a transcriptional cofactor that interacts with the TATA-binding protein and nuclear hormone receptor FTZ-F1 in Drosophila.

[0047] Accordingly, the availability of nucleic acid sequences encoding all or a portion of plant MBF1 transcription coactivator proteins would facilitate studies to better understand transcription initiation in plants and ultimately provide methods to engineer mechanisms to control transcription.

### SUMMARY OF THE INVENTION

[0048] Generally, it is the object of the present invention to provide nucleic acids and proteins relating to plant metabolism, including pyruvate dellydrogenase kinase. It is an object of the present invention to provide transgenic plants comprising the nucleic acids of the present invention, and methods for modulating, in a transgenic plant, expression of the nucleic acids of the present invention.

[0049] Therefore, in one aspect the present invention relates to an isolated nucleic acid comprising a member selected from the group consisting of (a) a polynucleotide having a specified sequence identity to a polynucleotide encoding a polypeptide of the present invention; (b) a polynucleotide which is complementary to the polynucleotide of (a); and, (c) a polynucleotide comprising a specified number of contiguous nucleotides from a polynucleotide of (a) or (b). The isolated nucleic acid can be DNA.

[0050] In other aspects the present invention relates to: 1) recombinant expression cassettes, comprising a nucleic acid of the present invention operably linked to a promoter, 2) a host cell into which has been introduced the recombinant expression cassette, and 3) a transgenic plant comprising the recombinant expression cassette. The host cell and plant are optionally from maize, wheat, rice, or soybean.

### DETAILED DESCRIPTION OF THE INVENTION

[0051] Overview

[0052] A. Nucleic Acids and Protein of the Present Invention

[0053] Unless otherwise stated, the polynucleotide and polypeptide sequences identified in Table 1 represent polynucleotides and polypeptides of the present invention. Table 1 lists the polypeptides that are described herein, the designation of the cDNA clones that comprise the nucleic acid fragments encoding polypeptides representing all or a substantial portion of these polypeptides, and the corresponding identifier (SEQ ID NO:) as used in the attached Sequence Listing. Table I also identifies the cDNA clones as individual ESTs (“EST”), the sequences of the entire cDNA inserts comprising the indicated cDNA clones (“FIS”), contigs assembled from two or more ESTs (“Contig”), contigs assembled from an FIS and one or more ESTs (“Contig”), or sequences encoding the mature protein derived from an EST, FIS, a contig, or an FIS and PCR (“CGS”). The sequence descriptions and Sequence Listing attached hereto comply with the rules governing nucleotide and/or amino acid sequence disclosures in patent applications as set forth in 37 C.F.R. §1.821-1.825.

TABLE 1
Proteins Relating to Plant Gene Transcription, Metabolism, and Physiology

| | | | SEQ ID NO | |
|---|---|---|---|---|
| Protein (Plant Source) | Clone Designation | Status | (Polynucleotide) | (Polypeptide) |
| PDK (Rice) | Contig of | Contig | 1 | 2 |
| | rlr24.pk0080.b1 | | | |
| | rls6.pk0077.c1 | | | |
| PDK (Rice) | rls6.pk0077.c1 (FIS) | CGS | 3 | 4 |
| PDK (Rice) | rr1.pk078.c2 | EST | 5 | 6 |
| PDK (Rice) | Contig of | Contig | 7 | 8 |
| | rds2c.pk006.b20 | | | |
| | rsr9n.pk002.i20 | | | |
| PDK (Rice) | rsr9n.pk002.i20 (FIS) | CGS | 9 | 10 |
| PDK (Soybean) | sgc2c.pk001.o9 | EST | 11 | 12 |
| PDK (Soybean) | sgc2c.pk001.o9 (FIS) | CGS | 13 | 14 |
| PDK (Soybean) | sgs2c.pk004.k10 | EST | 15 | 16 |
| PDK (Soybean) | sl2.pk131.h2 | EST | 17 | 18 |
| PDK (Soybean) | sml1c.pk001.m24 | EST | 19 | 20 |
| PDK (Wheat) | Contig of | Contig | 21 | 22 |
| | wl1n.pk0102.e9 | | | |
| | wlm0.pk0018.f3 | | | |
| | wlm96.pk0020.d2 | | | |
| | wlm96.pk061.l12 | | | |
| | wr1.pk164.e12 | | | |
| | wr1.pk167.c6 | | | |
| | wre1n.pk183.h2 | | | |
| PDK (Wheat) | wlm96.pk0020.d2 | CGS | 23 | 24 |
| | (FIS) | | | |
| RFT1 Homolog (Corn) | Contig of | Contig | 25 | 26 |
| | cco1n.pk087.j16 | | | |
| | p0041.crtap01r | | | |
| RFT1 Homolog (Corn) | Contig of | Contig* | 27 | 28 |
| | cco1n.pk087.j16 (FIS) | | | |
| | p0041.crtap01r | | | |
| RFT1 Homolog (Rice) | r10n.pk096.k13 | EST | 29 | 30 |
| RFT1 Homolog (Rice) | r10n.pk096.k13 | FIS | 31 | 32 |
| Phosphoinositide Binding | hel1.pk0013.c8 | EST | 33 | 34 |
| Protein (Jerusalem | | | | |
| Artichoke) | | | | |
| Phosphoinositide Binding | hel1.pk0013.c8 (FIS) | CGS | 35 | 36 |
| Protein (Jerusalem | | | | |
| Artichoke) | | | | |
| Phosphoinositide Binding | bsh1.pk0013.c3 | EST | 37 | 38 |
| Protein (Barley) | | | | |
| Phosphoinositide Binding | Contig of | Contig | 39 | 40 |
| Protein (Grape) | vdb1c.pk009.b9 | | | |
| | vdb1c.pk010.j20 | | | |
| Phosphoinositide Binding | vdb1c.pk010.j20 (FIS) | CGS | 41 | 42 |
| Protein (Grape) | | | | |
| Phosphoinositide Binding | p0127.cntbd60r | EST | 43 | 44 |
| Protein (Corn) | | | | |
| Phosphoinositide Binding | p0127.cntbd60r (FIS) | CGS | 45 | 46 |
| Protein (Corn) | | | | |
| Phosphoinositide Binding | Contig of | Contig | 47 | 48 |
| Protein (Corn) | p0018.chstf54r | | | |
| | p0109.cdadd47r | | | |
| Phosphoinositide Binding | p0109.cdadd47r (FIS) | CGS | 49 | 50 |
| Protein (Corn) | | | | |
| Phosphoinositide Binding | Contig of | Contig | 51 | 52 |
| Protein (Corn) | cr1n.pk0030.g6 | | | |
| | cr1n.pk0097.e12 | | | |
| | p0094.csstb82r | | | |
| Phosphoinositide Binding | Contig of | CGS | 53 | 54 |
| Protein (Corn) | cr1.pk0011.c1 | | | |
| | cr1n.pk0113.c3 | | | |
| | p0083.cldaz94r | | | |
| | p0094.csstb82r (FIS) | | | |
| Phosphoinositide Binding | Contig of | Contig | 55 | 56 |
| Protein (Rice) | rds2c.pk005.e5 | | | |
| | rl0n.pk0031.e10 | | | |
| Phosphoinositide Binding | rl0n.pk0031.e10 (FIS) | CGS | 57 | 58 |
| Protein (Rice) | | | | |
| Phosphoinositide Binding | Contig of | Contig | 59 | 60 |
| Protein (Rice) | rds1c.pk007.h14 | | | |
| | rds3c.pk001.b10 | | | |
| | rsl1n.pk010.j9 | | | |
| | rsl1n.pk010.l3 | | | |
| Phosphoinositide Binding | sdp4c.pk006.h12 | EST | 61 | 62 |
| Protein (Soybean) | | | | |
| Phosphoinositide Binding | sdp4c.pk006.h12 (FIS) | CGS | 63 | 64 |
| Protein (Soybean) | | | | |
| Phosphoinositide Binding | wlm4.pk0003.g1 | EST | 65 | 66 |
| Protein (Wheat) | | | | |
| Phosphoinositide Binding | wlm4.pk0003.g1 (FIS) | CGS | 67 | 68 |
| Protein (Wheat) | | | | |
| Phosphoinositide Binding | wlm4.pk0009.a8 | EST | 69 | 70 |
| Protein (Wheat) | | | | |
| Phosphoinositide Binding | wlm4.pk0009.a8 (FIS) | CGS | 71 | 72 |
| Protein (Wheat) | | | | |
| Phosphoinositide Binding | wdk2c.pk017.c19 | EST | 73 | 74 |
| Protein (Wheat) | | | | |
| Phosphoinositide Binding | wle1n.pk0043.a10 | EST | 75 | 76 |
| Protein (Wheat) | | | | |
| Phosphoinositide Binding | wyr1c.pk003.b6 | EST | 77 | 78 |
| Protein (Wheat) | | | | |
| Multiprotein Bridging | Contig of | CGS | 79 | 80 |
| Factor (Corn) | p0116.cesaj63r | | | |
| | p0128.cpibn44r | | | |
| Multiprotein Bridging | Contig of | CGS | 81 | 82 |
| Factor (Rice) | rlr12.pk0013.h12 | | | |
| | rls6.pk0062.d5 | | | |
| Multiprotein Bridging | Contig of | CGS | 83 | 84 |
| Factor (Soybean) | sls1c.pk008.p15 | | | |
| | sr1.pk0016.d3 | | | |
| | src3c.pk011.h11 | | | |
| Multiprotein Bridging | Contig of | CGS | 85 | 86 |
| Factor (Wheat) | wr1.pk178.b2 | | | |
| | wre1n.pk0104.f4 | | | |
| Dihydrolipoamide | Contig of | Contig | 87 | 88 |
| Dehydrogenase (Corn) | cen1.pk0045.a8 | | | |
| | p0016.ctsad33r | | | |
| Dihydrolipoamide | Contig of | Contig | 89 | 90 |
| Dehydrogenase (Corn) | cpd1c.pk012.a12 | | | |
| | cpe1c.pk011.d2 | | | |
| | p0005.cbmei53r | | | |
| | p0083.clddl26r | | | |
| | p0095.cwsas06r | | | |
| Dihydrolipoamide | cpd1c.pk012.a12 (FIS) | CGS | 91 | 92 |
| Dehydrogenase (Corn) | | | | |
| Dihydrolipoamide | Contig of | Contig | 93 | 94 |
| Dehydrogenase (Corn) | cen3n.pk0095.g7 | | | |
| | cen3n.pk0144.e11 | | | |
| Dihydrolipoamide | rsr9n.pk001.c9 | EST | 95 | 96 |
| Dehydrogenase (Rice) | | | | |
| Dihydrolipoamide | rsr9n.pk001.c9 | FIS | 97 | 98 |
| Dehydrogenase (Rice) | | | | |
| Dihydrolipoamide | sfl1.pk131.f9 | EST | 99 | 100 |
| Dehydrogenase (Soybean) | | | | |
| Dihydrolipoamide | sfl1.pk131.f9 (FIS) | CGS | 101 | 102 |
| Dehydrogenase (Soybean) | | | | |
| Dihydrolipoamide | Contig of | Contig | 103 | 104 |
| Dehydrogenase (Wheat) | wlm1.pk0015.c4 | | | |
| | wlmk1.pk0010.e2 | | | |
| | wr1.pk0055.a12 | | | |
| | wr1.pk0096.h7 | | | |
| Peroxisomal Lipid | etr1c.pk011.p10 (EST) | CGS | 105 | 106 |
| Transfer Protein (Cattail) | | | | |
| Peroxisomal Lipid | Contig of | CGS | 107 | 108 |
| Transfer Protein | eef1c.pk005.c14 | | | |
| (Eucalyptus) | eef1c.pk007.h7 | | | |
| Peroxisomal Lipid | Contig of | CGS | 109 | 110 |
| Transfer Protein (Corn) | cco1n.pk0006.d9 | | | |
| | cdo1c.pk002.a17 | | | |
| | p0107.cbcaq06r | | | |
| | p0118.chsbm24r | | | |
| Peroxisomal Lipid | cr1bio.pk0006.d6 | CGS | 111 | 112 |
| Transfer Protein (Corn) | (FIS) | | | |
| Peroxisomal Lipid | ehb2c.pk006.f22 (EST) | CGS | 113 | 114 |
| Transfer Protein (Para | | | | |
| Rubber) | | | | |
| Peroxisomal Lipid | Contig of | CGS | 115 | 116 |
| Transfer Protein (Rice) | rds1c.pk006.a3 | | | |
| | rr1.pk098.p24 | | | |
| | rsl1n.pk002.f6 | | | |
| Peroxisomal Lipid | sgs2c.pk004.h19 | CGS | 117 | 118 |
| Transfer Protein | (EST) | | | |
| (Soybean) | | | | |
| Peroxisomal Lipid | vs1n.pk013.j18 (EST) | CGS | 119 | 120 |
| Transfer Protein | | | | |
| (Vernonia) | | | | |
| Peroxisomal Lipid | w1m96.pk031.g10 | EST | 121 | 122 |
| Transfer Protein (Wheat) | | | | |
| Peroxisomal Lipid | Contig of | CGS | 123 | 124 |
| Transfer Protein (Wheat) | wdk3c.pk006.d12 | | | |
| | w1m96.pk054.b17 | | | |
| Peroxisomal Lipid | pps.pk0007.h8 (FIS) | CGS | 125 | 126 |
| Transfer Protein (Florida | | | | |
| Bitterbush) | | | | |
| YABBY Transcription | cco1n.pk054.k9 (FIS) | CGS | 127 | 128 |
| Factor (Corn) | | | | |
| YABBY Transcription | csi1.pk0013.g3 (FIS) | CGS | 129 | 130 |
| Factor (Corn) | | | | |
| YABBY Transcription | cbn10.pk0049.f10 | EST | 131 | 132 |
| Factor (Corn) | | | | |
| YABBY Transcription | Contig of | CGS | 133 | 134 |
| Factor (Corn) | cbn10.pk0049.f10 (FIS) | | | |
| | cco1n.pk054.n4 | | | |
| YABBY Transcription | cbn2n.pk0002.h2 | EST | 135 | 136 |
| Factor (Corn) | | | | |
| YABBY Transcription | cbn2n.pk0002.h2 (FIS) | CGS | 137 | 138 |
| Factor (Corn) | | | | |
| YABBY Transcription | Contig of | CGS | 139 | 140 |
| Factor (Corn) | cco1.pk0040.f2 | | | |
| | cco1n.pk0037.c3 | | | |
| | p0016.ctsbz78r | | | |
| | p0052.ckhah16r | | | |
| | p0052.ckhak16r | | | |
| YABBY Transcription | cco1.pk0040.f2 (FIS) | CGS | 141 | 142 |
| Factor (Corn) | | | | |
| YABBY Transcription | p0083.cldau06r (EST) | CGS | 143 | 144 |
| Factor (Corn) | | | | |
| YABBY Transcription | p0083.cldau06r (FIS) | CGS | 145 | 146 |
| Factor (Corn) | | | | |
| YABBY Transcription | Contig of | CGS | 147 | 148 |
| Factor (Corn) | cbn10.pk0061.d5 | | | |
| | p0081.chcaa15r | | | |
| | p0083.clder38rb | | | |
| | p0128.cpicc94r | | | |
| YABBY Transcription | Contig of | Contig | 149 | 150 |
| Factor (Rice) | rca1n.pk027.i5 | | | |
| | rds2c.pk008.o15 | | | |
| YABBY Transcription | rds2c.pk004.h9 (FIS) | CGS | 151 | 152 |
| Factor (Rice) | | | | |
| YABBY Transcription | sfl1.pk0074.g3 (FIS) | CGS | 153 | 154 |
| Factor (Soybean) | | | | |
| YABBY Transcription | Contig of | CGS | 155 | 156 |
| Factor (Soybean) | sah1c.pk004.c9 | | | |
| | sdp3c.pk006.m7 | | | |
| | ssm.pk0020.f6 | | | |
| YABBY Transcription | sdp3c.pk006.m7 (FIS) | CGS | 157 | 158 |
| Factor (Soybean) | | | | |
| YABBY Transcription | Contig of | Contig | 159 | 160 |
| Factor (Soybean) | se1.pk0029.g11 | | | |
| | sls1c.pk023.d12 | | | |
| YABBY Transcription | sfl1n.pk001.d4 (FIS) | CGS | 161 | 162 |
| Factor (Soybean) | | | | |
| YABBY Transcription | Contig of | CGS | 163 | 164 |
| Factor (Soybean) | sfl1.pk0060.f3 | | | |
| | ssl1c.pk002.k23 | | | |
| YABBY Transcription | ssl1c.pk002.k23 (FIS) | CGS | 165 | 166 |
| Factor (Soybean) | | | | |
| YABBY Transcription | Contig of | Contig | 167 | 168 |
| Factor (Wheat) | wdk2c.pk0004.c5 | | | |
| | wdk2c.pk007.c14 | | | |
| | wdk9n1.pk001.n20 | | | |
| YABBY Transcription | wdk2c.pk007.c14 (FIS) | CGS | 169 | 170 |
| Factor (Wheat) | | | | |
| YABBY Transcription | Contig of | Contig | 171 | 172 |
| Factor (Wheat) | wdk2c.pk017.c3 | | | |
| | wkm2n.pk008.p10 | | | |
| YABBY Transcription | wkm2n.pk008.p10 | CGS | 173 | 174 |
| Factor (Wheat) | (FIS) | | | |
| YABBY Transcription | Contig of | CGS | 175 | 176 |
| Factor (Wheat) | wle1.pk0003.a8 | | | |
| | wle1n.pk0004.d6 | | | |
| RPB9 (Corn) | cbn10.pk0004.g11 | CGS | 177 | 178 |
| | (FIS) | | | |
| RPB9 (Corn) | p0018.chssr46rb (EST) | CGS | 179 | 180 |
| RPB9 (Rice) | rca1c.pk0004.d10 (FIS) | CGS | 181 | 182 |
| RPB9 (Rice) | Contig of | Contig | 183 | 184 |
| | rdr1f.pk001.f2 | | | |
| | rlm1n.pk001.e13 | | | |
| RPB9 (Rice) | rlm1n.pk001.e13 (FIS) | CGS | 185 | 186 |
| RPB9 (Soybean) | Contig of | CGS | 187 | 188 |
| | se1.pk0003.d4 | | | |
| | sfl1nl.pk001.o20 | | | |
| RPB9 (Soybean) | sfl1nl.pk001.o20 (FIS) | CGS | 189 | 190 |
| RPB9 (Wheat) | w1m96.pk0007.a5 | CGS | 191 | 192 |
| | (EST) | | | |
| RPB9 (Wheat) | Contig of | CGS | 193 | 194 |
| | w1m0.pk0009.g9 | | | |
| | wre1n.pk0059.b9 | | | |
| RPB9 (Wheat) | wre1n.pk0059.b9 (FIS) | CGS | 195 | 196 |
| EREBP Homolog (Corn) | Contig of | Contig | 197 | 198 |
| | ccase-b.pk0002.d5 | | | |
| | csh3c.pk001.n24 | | | |
| EREBP Homolog (Corn) | chpc8.pk0003.c2 (FIS) | CGS | 199 | 200 |
| EREBP Homolog (Corn) | cpflc.pk001.a4 (FIS) | CGS | 201 | 202 |
| EREBP Homolog (Rice) | rl0n.pk096.h12 (FIS) | CGS | 203 | 204 |
| EREBP Homolog (Rice) | rls12.pk0001.d2 (FIS) | CGS | 205 | 206 |
| EREBP Homolog (Rice) | rls6.pk0076.e6 (FIS) | CGS | 207 | 208 |
| EREBP Homolog | Contig of | Contig | 209 | 210 |
| (Soybean) | ses2w.pk0013.d6 | | | |
| | sne1x.pk004.j22 | | | |
| EREBP Homolog | sfl1.pk0034.f3 (FIS) | CGS | 211 | 212 |
| (Soybean) | | | | |
| EREBP Homolog | src2c.pk002.o23 (FIS) | CGS | 213 | 214 |
| (Soybean) | | | | |
| EREBP Homolog | vs1n.pk014.n9 (FIS) | CGS | 215 | 216 |
| (Vernonia) | | | | |
| EREBP Homolog (Wheat) | wdk3c.pk012.h14 (FIS) | CGS | 217 | 218 |
| EREBP Homolog (Wheat) | wdr1f.pk003.l5 (FIS) | CGS | 219 | 220 |
| 3-Beta-Hydroxy-Delta(5)- | dms1c.pk001.p5 | EST | 221 | 222 |
| Steroid Dehydrogenase | | | | |
| (African Daisy) | | | | |
| 3-Beta-Hydroxy-Delta(5)- | Contig of | Contig | 223 | 224 |
| Steroid Dehydrogenase | cc1.pk0026.b9 | | | |
| (Corn) | ccase-b.pk0001.b2 | | | |
| 3-Beta-Hydroxy-Delta(5)- | Contig of | Contig | 225 | 226 |
| Steroid Dehydrogenase | ceb1.pk0094.e9 | | | |
| (Corn) | cen3n.pk0178.e9 | | | |
| 3-Beta-Hydroxy-Delta(5)- | ehb2c.pk013.n19 | EST | 227 | 228 |
| Steroid Dehydrogenase | | | | |
| (Para Rubber) | | | | |
| Steroid Dehydrogenase | Contig of | Contig | 229 | 230 |
| (Corn) | ceb1.pk0039.e7 | | | |
| | ces1f.pk004.i17 | | | |
| | p0134.carab02r | | | |
| Steroid Dehydrogenase | sgs2c.pk003.n17 | EST | 231 | 232 |
| (Soybean) | | | | |
| Steroid Dehydrogenase | Contig of | Contig | 233 | 234 |
| (Wheat) | wdk9n.pk001.p2 | | | |
| | wle1n.pk0058.f3 | | | |
| ACBF Homolog (Corn) | cbn10.pk0004.d5 (FIS) | CGS | 235 | 236 |
| ACBF Homolog (Corn) | Contig of | CGS | 237 | 238 |
| | cco1n.pk071.f24 | | | |
| | cco1n.pk080.g6 | | | |
| | cpe1c.pk001.m16 | | | |
| | p0005.cbmfh43r | | | |
| | p0039.cvmag51r | | | |
| ACBF Homolog (Corn) | ceb7f.pk003.n22 (FIS) | CGS | 239 | 240 |
| ACBF Homolog (Corn) | Contig of | CGS | 241 | 242 |
| | cbn10.pk0007.c6 | | | |
| | cca.pk0025.f4 | | | |
| | cen3n.pk0151.g4 | | | |
| | chpc8.pk0001.a11 | | | |
| | cph1c.pk001.o15 | | | |
| | cr1n.pk0029.g1 | | | |
| | p0083.clddg64r | | | |
| | p0104.cabak40r | | | |
| | p0126.cnldd44r | | | |
| ACBF Homolog (Corn) | cpi1c.pk015.g7 | FIS | 243 | 244 |
| ACBF Homolog (Corn) | cpj1c.pk001.m24 | FIS | 245 | 246 |
| ACBF Homolog (Corn) | cpj1c.pk004.g16 (FIS) | CGS | 247 | 248 |
| ACBF Homolog (Corn) | csi1n.pk0031.b7 (FIS) | CGS | 249 | 250 |
| ACBF Homolog (Corn) | csi1n.pk0049.h2 (FIS) | CGS | 251 | 252 |
| ACBF Homolog (Corn) | p0127.cntak21r (FIS) | CGS | 253 | 254 |
| ACBF Homolog (Rice) | rca1n.pk012.b24 | FIS | 255 | 256 |
| ACBF Homolog (Rice) | rlr48.pk0014.a12 (FIS) | CGS | 257 | 258 |
| ACBF Homolog (Rice) | rls48.pk0018.d5 | FIS | 259 | 260 |
| ACBF Homolog (Rice) | rr1.pk0027.fl1 | FIS | 261 | 262 |
| ACBF Homolog (Rice) | rr1.pk0068.d6 | FIS | 263 | 264 |
| ACBF Homolog (Rice) | rr1.pk079.o4 | FIS | 265 | 266 |
| ACBF Homolog | scn1c.pk001.i15 (FIS) | CGS | 267 | 268 |
| (Soybean) | | | | |
| ACBF Homolog | scr1c.pk002.k6 (FIS) | CGS | 269 | 270 |
| (Soybean) | | | | |
| ACBF Homolog | sdp4c.pk002.n23 (FIS) | CGS | 271 | 272 |
| (Soybean) | | | | |
| ACBF Homolog | sgc6c.pk001.e12 (FIS) | CGS | 273 | 274 |
| (Soybean) | | | | |
| ACBF Homolog | sgs2c.pk004.e8 (FIS) | CGS | 275 | 276 |
| (Soybean) | | | | |
| ACBF Homolog | srr3c.pk001.e1 (FIS) | CGS | 277 | 278 |
| (Soybean) | | | | |
| ACBF Homolog | ssl1c.pk005.i17 (FIS) | CGS | 279 | 280 |
| (Soybean) | | | | |
| ACBF Homolog | ssm.pk0001.b11 (FIS) | CGS | 281 | 282 |
| (Soybean) | | | | |
| ACBF Homolog (Wheat) | wdk3c.pk0003.a5 | FIS | 283 | 284 |
| ACBF Homolog (Wheat) | wlk1.pk0001.f8 | FIS | 285 | 286 |
| ACBF Homolog (Wheat) | wlm1.pk0008.c11 | FIS | 287 | 288 |
| ACBF Homolog (Wheat) | wlm96.pk030.m18 | FIS | 289 | 290 |
| TFIIA Large Subunit | p0015.cdpfd14rb (FIS) | CGS | 291 | 292 |
| (Corn) | | | | |
| TFIIA Large Subunit | p0115.clsmm93r (FIS) | CGS | 293 | 294 |
| (Corn) | | | | |
| TFIIA Large Subunit | res1c.pk004.e6 (FIS) | CGS | 295 | 296 |
| (Rice) | | | | |
| TFIIA Large Subunit | sl2.pk0051.d3 (FIS) | CGS | 297 | 298 |
| (Soybean) | | | | |
| TFIIA Large Subunit | ss1.pk0060.d4 (FIS) | CGS | 299 | 300 |
| (Soybean) | | | | |
| TFIIA Large Subunit | wlmk8.pk0019.f6 | EST | 301 | 302 |
| (Wheat) | | | | |
| TFIIA Small Subunit | Contig of | CGS | 303 | 304 |
| (Corn) | cen3n.pk0125.fl2 | | | |
| | p0015.cdpeg26r | | | |
| TFIIA Small Subunit | Contig of | CGS | 305 | 306 |
| (Corn) | cco1.pk0047.h11 | | | |
| | cen3n.pk0161.b5 | | | |
| TFIIA Small Subunit | rca1n.pk025.b22 (FIS) | CGS | 307 | 308 |
| (Rice) | | | | |
| TFIIA Small Subunit | rlr24.pk0002.b3 (FIS) | CGS | 309 | 310 |
| (Rice) | | | | |
| TFIIA Small Subunit | Contig of | Contig | 311 | 312 |
| (Soybean) | se3.pk0033.a12 | | | |
| | sfl1.pk0095.fl1 | | | |
| TFIIA Small Subunit | srr3c.pk002.n22 (FIS) | CGS | 313 | 314 |
| (Soybean) | | | | |
| TFIIA Small Subunit | wdk2c.pk013.17 (FIS) | CGS | 315 | 316 |
| (Wheat) | | | | |
| PITP (Barley) | bsh1.pk0008.b7 | FIS | 317 | 318 |
| PITP (Corn) | Contig of | CGS | 319 | 320 |
| | cr1n.pk0085.g2 | | | |
| | cs1.pk0082.c4 (FIS) | | | |
| | p0008.cb3ld47r | | | |
| | p0059.cmsbh07r | | | |
| | p0068.clsah90r | | | |
| | p0102.ceray51r | | | |
| | p0126.cnlbg89r | | | |
| PITP (Corn) | Contig of | Contig | 321 | 322 |
| | cpc1c.pk003.p15 | | | |
| | p0077.cpoab24r | | | |
| | p0077.cpoad67r | | | |
| | p0077.cpoaj21r | | | |
| PITP (Corn) | Contig of | CGS | 323 | 324 |
| | cpf1c.pk006.f21 | | | |
| | cr1n.pk0100.g9 | | | |
| | ctn1c.pk001.d19 | | | |
| | p0040.cftaa93r | | | |
| | p0097.cqrab20r | | | |
| | p0128.cpico20r | | | |
| PITP (Corn) | cta1n.pk0027.b9 | FIS | 325 | 326 |
| PITP (Corn) | Contig of | Contig | 327 | 328 |
| | cen3n.pk0053.d6 | | | |
| | cen3n.pk0058.h1 | | | |
| | cgs1c.pk002.h6 | | | |
| | p0075.cslag46r | | | |
| | p0083.clddi23r | | | |
| | p0098.cdfae47r | | | |
| | p0126.cnlaz32r | | | |
| PITP (Corn) | Contig of | Contig | 329 | 330 |
| | p0083.cldem48r | | | |
| | p0125.czaaj01r | | | |
| | p0128.cpiby92r | | | |
| PITP (Rice) | rlr2.pk0005.a12 | EST | 331 | 332 |
| PITP (Rice) | rlr2.pk0005.a12 (FIS) | CGS | 333 | 334 |
| PITP (Soybean) | Contig of | Contig | 335 | 336 |
| | sdp2c.pk026.i5 | | | |
| | se5.pk0029.b12 | | | |
| PITP (Soybean) | Contig of | Contig | 337 | 338 |
| | sdp3c.pk017.m12 | | | |
| | ses2w.pk0015.c12 | | | |
| PITP (Soybean) | ses2w.pk0015.c12 | CGS | 339 | 340 |
| | (FIS) | | | |
| PITP (Soybean) | sfl1.pk0038.c9 | EST | 341 | 342 |
| PITP (Soybean) | Contig of | Contig* | 343 | 344 |
| | sfl1.pk0024.e2 | | | |
| | sfl1.pk0038.c9 (FIS) | | | |
| PITP (Soybean) | Contig of | Contig | 345 | 346 |
| | sgc7c.pk001.e20 | | | |
| | sgs2c.pk002.g7 | | | |
| | sr1.pk0051.e6 | | | |
| PITP (Soybean) | sls2c.pk001.i8 | FIS | 347 | 348 |
| PITP (Soybean) | ssm.pk0033.c10 | EST | 349 | 350 |
| PITP (Soybean) | ssm.pk0033.c10 (FIS) | CGS | 351 | 352 |
| PITP (Wheat) | wl1n.pk0024.g3 | FIS | 353 | 354 |
| PITP (Wheat) | Contig of | Contig | 355 | 356 |
| | wdk2c.pk013.e14 | | | |
| | wl1.pk0008.h10 | | | |
| | wl1.pk0012.b6 | | | |
| | w1m24.pk0031.c1 | | | |
| PITP (Wheat) | wr1.pk0068.h1 | FIS | 357 | 358 |
| PITP (Wheat) | wdk1c.pk012.j14 | EST | 359 | 360 |
| PITP (Wheat) | wle1.pk0002.c10 | EST | 361 | 362 |

[0054] Table 2 provides references to earlier U.S. Provisional Applications in which particular sequences in this application have been previously filed. For example, the first entry indicates that SEQ ID NOs: 1 and 2 disclosed herein are SEQ ID NOs: 5 and 6, respectively, in U.S. Provisional Application No. 60/172958 (Dupont Docket No. BB1421P1).

TABLE 2
Previously Filed Sequences in U.S. Provisional Applications

| | U.S. Provisional Application | | |
|---|---|---|---|
| SEQ ID NO. | Serial No. | DuPont Docket No. | SEQ ID NO. |
| 1;2 | 60/172958 | BB1421P1 | 5;6 |
| 5;6 | 60/172958 | BB1421P1 | 7;8 |
| 7;8 | 60/172958 | BB1421P1 | 9;10 |
| 11;12 | 60/172958 | BB1421P1 | 11;12 |
| 15;16 | 60/172958 | BB1421P1 | 13;14 |
| 17;18 | 60/172958 | BB1421P1 | 15;16 |
| 19;20 | 60/172958 | BB1421P1 | 17;18 |
| 21;22 | 60/172958 | BB1421P1 | 19;20 |
| 25;26 | 60/146511 | BB1387P1 | 1;2 |
| 29;30 | 60/146511 | BB1387P1 | 3;4 |
| 33;34 | 60/156006 | BB1400P1 | 1;2 |
| 37;38 | 60/156006 | BB1400P1 | 3;4 |
| 39;40 | 60/156006 | BB1400P1 | 5;6 |
| 43;44 | 60/156006 | BB1400P1 | 7;8 |
| 47;48 | 60/156006 | BB1400P1 | 9;10 |
| 51;52 | 60/156006 | BB1400P1 | 11;12 |
| 55;56 | 60/156006 | BB1400P1 | 13;14 |
| 59;60 | 60/156006 | BB1400P1 | 15;16 |
| 61;62 | 60/156006 | BB1400P1 | 17;18 |
| 65;66 | 60/156006 | BB1400P1 | 19;20 |
| 69;70 | 60/156006 | BB1400P1 | 21;22 |
| 75;76 | 60/156006 | BB1400P1 | 23;24 |
| 79;80 | 60/157287 | BB1411P1 | 1;2 |
| 81;82 | 60/157287 | BB1411P1 | 3;4 |
| 83;84 | 60/157287 | BB1411P1 | 5;6 |
| 85;86 | 60/157287 | BB1411P1 | 7;8 |
| 87;88 | 60/169767 | BB1415PRV | 1;2 |
| 89;90 | 60/169767 | BB1415PRV | 3;4 |
| 93;94 | 60/169767 | BB1415PRV | 5;6 |
| 95;96 | 60/169767 | BB1415PRV | 7;8 |
| 99;100 | 60/169767 | BB1415PRV | 9;10 |
| 103;104 | 60/169767 | BB1415PRV | 11;12 |
| 105;106 | 60/171054 | BB1412P1 | 1;2 |
| 107;108 | 60/171054 | BB1412P1 | 3;4 |
| 109;110 | 60/171054 | BB1412P1 | 5;6 |
| 113;114 | 60/171054 | BB1412P1 | 7;8 |
| 117;118 | 60/171054 | BB1412P1 | 9;10 |
| 119;120 | 60/171054 | BB1412P1 | 11;12 |
| 121;122 | 60/171054 | BB1412P1 | 13;14 |
| 123;124 | 60/171054 | BB1412P1 | 15;16 |
| 127;128 | 60/171515 | BB1431PRV | 1;2 |
| 129;130 | 60/171515 | BB1431PRV | 3;4 |
| 131;132 | 60/171515 | BB1431PRV | 5;6 |
| 135;136 | 60/171515 | BB1431PRV | 7;8 |
| 139;140 | 60/171515 | BB1431PRV | 9;10 |
| 143;144 | 60/171515 | BB1431PRV | 11;12 |
| 147;148 | 60/171515 | BB1431PRV | 13;14 |
| 149;150 | 60/171515 | BB1431PRV | 15;16 |
| 151;152 | 60/171515 | BB1431PRV | 17;18 |
| 153;154 | 60/171515 | BB1431PRV | 19;20 |
| 155;156 | 60/171515 | BB1431PRV | 21;22 |
| 159;160 | 60/171515 | BB1431PRV | 23;24 |
| 161;162 | 60/171515 | BB1431PRV | 25;26 |
| 163;164 | 60/171515 | BB1431PRV | 27;28 |
| 167;168 | 60/171515 | BB1431PRV | 29;30 |
| 171;172 | 60/171515 | BB1431PRV | 31;32 |
| 175;176 | 60/171515 | BB1431PRV | 33;34 |
| 177;178 | 60/173535 | BB1433PRV | 1;2 |
| 179;180 | 60/173535 | BB1433PRV | 3;4 |
| 181;182 | 60/173535 | BB1433PRV | 5;6 |
| 183;184 | 60/173535 | BB1433PRV | 7;8 |
| 187;188 | 60/173535 | BB1433PRV | 9;10 |
| 191;192 | 60/173535 | BB1433PRV | 11;12 |
| 193;194 | 60/173535 | BB1433PRV | 13;14 |
| 317;318 | 60/156899 | BB1398P1 | 1;2 |
| 319;320 | 60/156899 | BB1398P1 | 3;4 |
| 325;326 | 60/156899 | BB1398P1 | 5;6 |
| 331;332 | 60/156899 | BB1398P1 | 7;8 |
| 337;338 | 60/156899 | BB1398P1 | 9;10 |
| 341;342 | 60/156899 | BB1398P1 | 11;12 |
| 349;350 | 60/156899 | BB1398P1 | 13;14 |
| 353;354 | 60/156899 | BB1398P1 | 15;16 |
| 355;356 | 60/156899 | BB1398P1 | 17;18 |
| 357;358 | 60/156899 | BB1398P1 | 19;20 |
| 359;360 | 60/156899 | BB1398P1 | 21;22 |

[0055] cDNA clones encoding proteins involved in plant gene transcription, metabolism, and physiology were identified by conducting BLAST (Basic Local Alignment Search Tool; Altschul et al. (1993) J. Mol. Biol. 215:403-410; see also www.ncbi.nlm.nih.gov/BLAST/) searches for similarity to sequences contained in the BLAST “nr” database (comprising all non-redundant GenBank CDS translations, sequences derived from the 3-dimensional structure Brookhaven Protein Data Bank, the last major release of the SWISS-PROT protein sequence database, EMBL, and DDBJ databases). The cDNA sequences obtained using methods such as those described in Example 3 were analyzed for similarity to all publicly available DNA sequences contained in the “nr” database using the BLASTN algorithm provided by the National Center for Biotechnology Information (NCBI). The DNA sequences were translated in all reading frames and compared for similarity to all publicly available protein sequences contained in the “nr” database using the BLASTX algorithm (Gish and States (1993) Nat. Genet. 3:266-272) provided by the NCBI. For convenience, the P-value (probability) of observing a match of a cDNA sequence to a sequence contained in the searched databases merely by chance as calculated by BLAST are reported herein as “pLog” values, which represent the negative of the logarithm of the reported P-value. Accordingly, the greater the pLog value, the greater the likelihood that the cDNA sequence and the BLAST “hit” represent homologous proteins.

[0056] The BLASTX search using the sequences from clones listed in Table 1 revealed similarity of the polypeptides encoded by the cDNAs to various proteins involved in gene transcription, metabolism, and physiology. Shown in Table 3 are the BLAST results for sequences enumerated in Table 1.

TABLE 3
BLAST Results for Sequences Encoding Polypeptides
Homologous to Proteins Involved in Gene Transcription,
Metabolism and Physiology

| | | Homologue NCBI | BLAST |
|---|---|---|---|
| SEQ ID | | GenBank Identifier (GI) | pLog |
| NO: | Homologue Species | No. | Value |
| 2 | Zea mays | 3746431 | 85.22 |
| 4 | Zea mays | 3746431 | >180.00 |
| 6 | Zea mays | 3746431 | 49.40 |
| 8 | Zea mays | 3695005 | 109.00 |
| 10 | Zea mays | 3695005 | >180.00 |
| 12 | Arabidopsis thaliana | 4049632 | 68.22 |
| 14 | Arabidopsis thaliana | 4049632 | >180.00 |
| 16 | Arabidopsis thaliana | 4049632 | 33.05 |
| 18 | Arabidopsis thaliana | 4049632 | 45.30 |
| 20 | Zea mays | 3695005 | 25.00 |
| 22 | Zea mays | 3695005 | 167.00 |
| 24 | Zea mays | 3695005 | >180.00 |
| 26 | Saccharomyces cerevisiae | 586407 | 8.70 |
| 28 | Saccharomyces cerevisiae | 586407 | 24.70 |
| 30 | Saccharomyces cerevisiae | 586407 | 9.00 |
| 32 | Saccharomyces cerevisiae | 586407 | 9.22 |
| 34 | Glycine max | 2739044 | 51.00 |
| 36 | Glycine max | 2739044 | 129.00 |
| 38 | Glycine max | 2739044 | 38.70 |
| 40 | Glycine max | 2739044 | 69.52 |
| 42 | Glycine max | 7488694 | 144.00 |
| 44 | Glycine max | 2739044 | 59.30 |
| 46 | Glycine max | 2739044 | 131.00 |
| 48 | Glycine max | 2739044 | 79.22 |
| 50 | Glycine max | 2739044 | 136.00 |
| 52 | Glycine max | 2739046 | 51.30 |
| 54 | Glycine max | 7488696 | 66.70 |
| 56 | Glycine max | 2739044 | 103.00 |
| 58 | Glycine max | 2739044 | 135.00 |
| 60 | Glycine max | 2739046 | 73.70 |
| 62 | Glycine max | 2739044 | 24.70 |
| 64 | Glycine max | 2739044 | 136.00 |
| 66 | Glycine max | 2739044 | 16.15 |
| 68 | Glycine max | 7488694 | 130.00 |
| 70 | Glycine max | 2739044 | 30.70 |
| 72 | Glycine max | 2739044 | 131.00 |
| 74 | Glycine max | 7488696 | 19.00 |
| 76 | Glycine max | 2739046 | 38.10 |
| 78 | Glycine max | 7488696 | 21.30 |
| 80 | Ricinus communis | 1632831 | 62.70 |
| 82 | Ricinus communis | 1632831 | 45.52 |
| 84 | Ricinus communis | 1632831 | 65.70 |
| 86 | Arabidopsis thaliana | 4512684 | 60.70 |
| 88 | Synechocystis sp. | 1651828 | 69.04 |
| 90 | Synechocystis sp. | 1651828 | 58.70 |
| 92 | Arabidopsis thaliana | 7159282 | >180.00 |
| 94 | Synechocystis sp. | 1651828 | 79.04 |
| 96 | Synechocystis sp. | 1651828 | 29.05 |
| 98 | Arabidopsis thaliana | 7159282 | 123.00 |
| 100 | Synechocystis sp. | 1651828 | 80.52 |
| 102 | Arabidopsis thaliana | 7159282 | >180.00 |
| 104 | Synechocystis sp. | 1651828 | 105.00 |
| 106 | Homo sapiens | 432973 | 11.00 |
| 108 | Homo sapiens | 432973 | 10.70 |
| 110 | Homo sapiens | 432973 | 8.05 |
| 112 | Caenorhabditis elegans | 3881780 | 9.40 |
| 114 | Homo sapiens | 432973 | 10.00 |
| 116 | Bos taurus | 128383 | 10.40 |
| 118 | Homo sapiens | 432973 | 10.00 |
| 120 | Homo sapiens | 432973 | 10.52 |
| 122 | Homo sapiens | 432973 | 5.22 |
| 124 | Homo sapiens | 432973 | 10.52 |
| 126 | Caenorhabditis elegans | 3881780 | 10.70 |
| 128 | Arabidopsis thaliana | 4836698 | 43.04 |
| 130 | Arabidopsis thaliana | 4836698 | 42.30 |
| 132 | Oryza sativa | 3859568 | 37.40 |
| 134 | Oryza sativa | 3859568 | 75.10 |
| 136 | Oryza sativa | 3859570 | 30.40 |
| 138 | Oryza sativa | 3859570 | 35.00 |
| 140 | Arabidopsis thaliana | 3822216 | 64.30 |
| 142 | Arabidopsis thaliana | 3822216 | 64.22 |
| 144 | Oryza sativa | 3859570 | 60.52 |
| 146 | Oryza sativa | 3859570 | 60.52 |
| 148 | Oryza sativa | 3859570 | 59.52 |
| 150 | Arabidopsis thaliana | 3822216 | 38.52 |
| 152 | Oryza sativa | 3859570 | 61.30 |
| 154 | Arabidopsis thaliana | 4836698 | 55.15 |
| 156 | Arabidopsis thaliana | 3822216 | 66.05 |
| 158 | Arabidopsis thaliana | 3822216 | 66.05 |
| 160 | Arabidopsis thaliana | 3822216 | 27.70 |
| 162 | Arabidopsis thaliana | 4928751 | 59.00 |
| 164 | Arabidopsis thaliana | 4928751 | 59.00 |
| 166 | Arabidopsis thaliana | 4928751 | 59.00 |
| 168 | Arabidopsis thaliana | 4836698 | 46.52 |
| 170 | Arabidopsis thaliana | 4836698 | 41.70 |
| 172 | Oryza sativa | 3859570 | 18.15 |
| 174 | Oryza sativa | 3859570 | 56.00 |
| 176 | Oryza sativa | 3859570 | 87.10 |
| 178 | Homo sapiens | 5453930 | 25.00 |
| 180 | Homo sapiens | 5453930 | 35.40 |
| 182 | Homo sapiens | 5453930 | 28.40 |
| 184 | Homo sapiens | 5453930 | 34.00 |
| 186 | Homo sapiens | 5453930 | 37.40 |
| 188 | Homo sapiens | 5453930 | 37.15 |
| 190 | Homo sapiens | 5453930 | 37.22 |
| 192 | Homo sapiens | 5453930 | 23.04 |
| 194 | Homo sapiens | 5453930 | 34.40 |
| 196 | Homo sapiens | 5453930 | 37.30 |
| 198 | Stylosanthes hamata | 4099921 | 32.40 |
| 200 | Stylosanthes hamata | 4099921 | 38.10 |
| 202 | Stylosanthes hamata | 4099921 | 36.00 |
| 204 | Nicotiana tabacum | 4587373 | 43.30 |
| 206 | Stylosanthes hamata | 4099921 | 41.15 |
| 208 | Stylosanthes hamata | 4099921 | 41.00 |
| 210 | Arabidopsis thaliana | 3434973 | 36.10 |
| 212 | Arabidopsis thaliana | 4850382 | 33.52 |
| 214 | Arabidopsis thaliana | 7531110 | 41.22 |
| 216 | Arabidopsis thaliana | 7531110 | 38.70 |
| 218 | Stylosanthes hamata | 4099921 | 42.40 |
| 220 | Arabidopsis thaliana | 1903358 | 34.05 |
| 222 | Arabidopsis thaliana | 2289008 | 10.70 |
| 224 | Arabidopsis thaliana | 3075392 | 90.70 |
| 226 | Arabidopsis thaliana | 2289008 | 24.70 |
| 228 | Arabidopsis thaliana | 2289008 | 21.52 |
| 230 | Arabidopsis thaliana | 2459443 | 79.52 |
| 232 | Arabidopsis thaliana | 2459443 | 69.10 |
| 234 | Arabidopsis thaliana | 2459443 | 97.70 |
| 236 | Nicotiana tabacum | 1899188 | 104.00 |
| 238 | Nicotiana tabacum | 1899188 | 114.00 |
| 240 | Nicotiana tabacum | 1899188 | 99.00 |
| 242 | Nicotiana tabacum | 1899188 | 96.22 |
| 244 | Nicotiana tabacum | 1899188 | 102.00 |
| 246 | Nicotiana tabacum | 1899188 | 72.15 |
| 248 | Nicotiana tabacum | 1899188 | 120.00 |
| 250 | Nicotiana tabacum | 1899188 | 95.00 |
| 252 | Nicotiana tabacum | 1899188 | 105.00 |
| 254 | Nicotiana tabacum | 1899188 | 109.00 |
| 256 | Nicotiana tabacum | 1899188 | 93.52 |
| 258 | Nicotiana tabacum | 1899188 | 110.00 |
| 260 | Nicotiana tabacum | 1899188 | 109.00 |
| 262 | Nicotiana tabacum | 1899188 | 96.00 |
| 264 | Nicotiana tabacum | 1899188 | 101.00 |
| 266 | Nicotiana tabacum | 1899188 | 107.00 |
| 268 | Nicotiana tabacum | 1899188 | 109.00 |
| 270 | Nicotiana tabacum | 1899188 | 130.00 |
| 272 | Nicotiana tabacum | 1899188 | 147.00 |
| 274 | Nicotiana tabacum | 1899188 | 131.00 |
| 276 | Nicotiana tabacum | 1899188 | 111.00 |
| 278 | Nicotiana tabacum | 1899188 | 102.00 |
| 280 | Nicotiana tabacum | 1899188 | 133.00 |
| 282 | Nicotiana tabacum | 1899188 | 96.40 |
| 284 | Arabidopsis thaliana | 4835793 | 21.30 |
| 286 | Nicotiana tabacum | 1899188 | 69.52 |
| 288 | Nicotiana tabacum | 1899188 | 84.52 |
| 290 | Nicotiana tabacum | 1899188 | 68.00 |
| 292 | Arabidopsis thaliana | 2826884 | 97.52 |
| 294 | Arabidopsis thaliana | 2826884 | 101.00 |
| 296 | Arabidopsis thaliana | 2826884 | 96.15 |
| 298 | Arabidopsis thaliana | 2826884 | 130.00 |
| 300 | Arabidopsis thaliana | 2826884 | 133.00 |
| 302 | Arabidopsis thaliana | 2826884 | 10.30 |
| 304 | Arabidopsis thaliana | 2826882 | 45.00 |
| 306 | Arabidopsis thaliana | 2826882 | 54.00 |
| 308 | Arabidopsis thaliana | 2826882 | 44.00 |
| 310 | Arabidopsis thaliana | 2826882 | 46.70 |
| 312 | Arabidopsis thaliana | 2826882 | 46.15 |
| 314 | Arabidopsis thaliana | 2826882 | 50.40 |
| 316 | Arabidopsis thaliana | 2826882 | 46.70 |
| 318 | Arabidopsis thaliana | 4006913 | 127.00 |
| 320 | Arabidopsis thaliana | 4006913 | 151.00 |
| 322 | Arabidopsis thaliana | 4567235 | 64.70 |
| 324 | Arabidopsis thaliana | 4567235 | 124.00 |
| 326 | Arabidopsis thaliana | 4006913 | 46.04 |
| 328 | Arabidopsis thaliana | 4567283 | 176.00 |
| 330 | Arabidopsis thaliana | 4006913 | 138.00 |
| 332 | Arabidopsis thaliana | 4006913 | 148.00 |
| 334 | Arabidopsis thaliana | 4914429 | >180.00 |
| 336 | Arabidopsis thaliana | 4914429 | 72.70 |
| 338 | Arabidopsis thaliana | 3096927 | 133.00 |
| 340 | Arabidopsis thaliana | 4914429 | >180.00 |
| 342 | Arabidopsis thaliana | 4006913 | 90.10 |
| 344 | Arabidopsis thaliana | 4874285 | 117.00 |
| 346 | Arabidopsis thaliana | 7267559 | 71.70 |
| 348 | Arabidopsis thaliana | 4914429 | 26.30 |
| 350 | Arabidopsis thaliana | 3953470 | 57.70 |
| 352 | Arabidopsis thaliana | 4914429 | >180.00 |
| 354 | Arabidopsis thaliana | 4567283 | 84.22 |
| 356 | Arabidopsis thaliana | 4006913 | 102.00 |
| 358 | Arabidopsis thaliana | 3953470 | 74.00 |
| 360 | Arabidopsis thaliana | 3953470 | 6.22 |
| 362 | Oryza sativa | 5257268 | 2.70 |

[0057] NCBI GenBank Identifier (GI) Nos. 3746431, 3695005, and 4049632 are amino acid sequences of pyruvate dehydrogenase kinase; NCBI GI No. 586407 is the amino acid sequence of Saccharomyces cerevisiae RFT1 protein; NCBI GI Nos. 2739044, 7488694, 2739046, and 7488696 are amino acid sequences of phosphoinositide binding protein; NCBI GI Nos. 1632831 and 4512684 are multiprotein bridging factor amino acid sequences; NCBI GI Nos. 1651828 and 7159282 are dihydrolipoamide dehydrogenase amino acid sequences; NCBI GI Nos. 432973, 3881780, and 128383 are peroxisomal lipid transfer protein amino acid sequences; NCBI GI Nos. 4836698, 3822216, and 4928751 are amino acid sequences of different YABBY transcription factors; NCBI GI Nos. 3859568 and 3859570 are amino acid sequences of YABBY transcription factor homologs; NCBI GI No. 5453930 is RNA polymerase 11 subunit RPB9 amino acid sequence; NCBI GI Nos. 3434973, 4587373 and 7531110 are EREBP amino acid sequences; NCBI GI Nos. 4099921, 4850382, and 1903358 are EREBP homolog amino acid sequences; NCBI GI Nos. 2289008 and 3075392 are 3-beta-hydroxysteroid dehydrogenase amino acid sequences; NCBI GI No. 2459443 is steroid dehydrogenase amino acid sequence; NCBI GI No. 1899188 is ACBF amino acid sequence; NCBI GI No. 4835793 is ACBF homolog amino acid sequence; NCBI GI No. 2826884 is TFIIA large subunit amino acid sequence; NCBI GI No. 2826882 is TFIIA small subunit amino acid sequence; and NCBI GenBank Identifier GI Nos. 4006913, 4567235, 4567283, 4914429, 3096927, 4874285, 7267559, 5257268, and 3953470 are PITP amino acid sequences.

[0058] FIG. 1 depicts the amino acid sequence alignment of the pyruvate dehydrogenase kinase sequences set forth in SEQ ID NOs: 4, 10, 14, and 24, and the Zea mays pyruvate dehydrogenase kinase sequence (NCBI GenBank Identifier (GI) No. 3695005; SEQ ID NO: 363). SEQ ID NOs: 4, 10, 14, and 24 exhibit 81%, 90%, 72%, and 87% identity, respectively, with SEQ ID NO: 363.

[0059] FIG. 2A depicts the amino acid sequence alignment of the phosphoinositide binding protein sequences set forth in SEQ ID NOs: 36, 42, 46, 50, 58, 64, 68, and 72, and the Glycine max phosphoinositide binding protein sequence (NCBI GenBank Identifier (GI) No. 2739044; SEQ ID NO: 364). SEQ ID NOs: 36, 42, 46, 50, 58, 64, 68, and 72 exhibit 67%, 75%, 66%, 67%, 67%, 67%, 67%, and 64% identity, respectively, with SEQ ID NO: 364.

[0060] FIG. 2B depicts the amino acid sequence alignment of the phosphoinositide binding protein sequence set forth in SEQ ID NO: 54 and the Glycine max phosphoinositide binding protein sequence (NCBI GenBank Identifier (GI) No. 2739046; SEQ ID NO: 365). SEQ ID NO: 54 exhibits 45% identity with SEQ ID NO: 365.

[0061] FIG. 3 depicts the amino acid sequence alignment of the multiprotein bridging factor sequences set forth in SEQ ID NOs: 80, 82, 84, and 86, and the Ricinus communis multiprotein bridging factor sequence (NCBI GenBank Identifier (GI) No. 163283 1; SEQ ID NO: 366). SEQ ID NOs: 80, 82, 84, and 86 exhibit 81%, 62%, 85%, and 78% identity, respectively, with SEQ ID NO: 366.

[0062] FIG. 4 depicts the amino acid sequence alignment of the dihydrolipoamide dehydrogenase sequences set forth in SEQ ID NOs: 92 and 102, and the Arabidopsis thaliana dihydrolipoamide dehydrogenase sequence (NCBI GenBank Identifier (GI) No. 7159282; SEQ ID NO: 367). SEQ ID NOs: 92 and 102 exhibit 75% and 80% identity, respectively, with SEQ ID NO: 367.

[0063] FIG. 5 depicts the amino acid sequence alignment of the peroxisomal lipid transfer protein sequences set forth in SEQ ID NOs: 106, 108, 110, 112, 114, 116, 118, 120, 124, and 126, and the Homo sapiens peroxisomal lipid transfer protein sequence (NCBI GenBank Identifier(GI)No.432973;SEQ ID NO: 368). SEQ ID NOs: 106, 108, 110, 112, 114, 116, 118, 120, 124, and 126 exhibit 28%, 26%, 25%, 26%, 27%, 27%, 24%, 28%, 25% and 26% identity, respectively, with SEQ ID NO: 368.

[0064] FIG. 6 depicts the amino acid sequence alignment of the YABBY transcription factor sequences set forth in SEQ ID NOs: 128, 130, 134, 138, 140, 142, 144, 146, 148, 152, 154, 156, 158, 162, 164, 166, 170, 174, and 176, and the Arabidopsis thaliana YABBY transcription factor sequence (NCBI GenBank Identifier (GI) No. 4836698; SEQ ID NO: 369). SEQ ID NOs: 128, 130, 134, 138, 140, 142, 144, 146, 148, 152, 154, 156, 158, 162, 164, 166, 170, 174, and 176 exhibit45%, 47%, 36%, 20%, 38%, 38%, 35%, 35%, 37%, 36%, 59%, 35%, 35%, 37%, 34%, 34%, 45%, 37%, and 34% identity, respectively, with SEQ ID NO: 369.

[0065] FIG. 7 depicts the amino acid sequence alignment of the RNA polymerase 11 subunit RPB9 sequences set forth in SEQ ID NOs: 178, 180, 182, 186, 188, 190, 192, 194, and 196, and the Homo sapiens RNA polymerase II subunit RPB9 sequence (NCBI GenBank Identifier (GI) No. 5453930; SEQ ID NO: 370). SEQ ID NOs: 178, 180, 182, 186, 188, 190, 192, 194, and 196 exhibit 41%, 53%, 42%, 55%, 53%, 53%, 35%, 51%, and 53% identity respectively, with SEQ ID NO: 370.

[0066] FIG. 8 depicts the amino acid sequence alignment of the EREBP homolog sequences set forth in SEQ ID NOs: 200, 202, 204, 206, 208, 212, 214, 216, 218, and 220, and the Stylosanthes hamata EREBP homolog sequence (NCBI GenBank Identifier (GI) No. 4099921; SEQ ID NO: 371). SEQ ID NOs: 200, 202, 204, 206, 208, 212, 214, 216, 218, and 220 exhibit 38%, 39%, 29%, 40%, 41%, 27%, 39%, 39%, 39%, and 32% identity respectively, with SEQ ID NO: 371.

[0067] FIG. 9 depicts the amino acid sequence alignment of the ACBF homolog sequences set forth in SEQ ID NOs: 236, 238, 240, 242, 248, 250, 252, 254, 258, 268, 270, 272, 274, 276, 278, 280, and 282, and the Nicotiana tabacum ACBF sequence (NCBI GenBank Identifier (GI) No. 1899188; SEQ ID NO: 372). SEQ ID NOs: 236, 238, 240, 242, 248, 250, 252, 254, 258, 268, 270, 272, 274, 276, 278, 280, and 282 exhibit 45%, 50%, 44%, 41%, 48%, 41%, 42%, 44%, 48%, 49%, 54%, 57%, 52%, 48%, 44%, 60%, and 41identity, respectively, with SEQ ID NO: 372.

[0068] FIG. 10 depicts the amino acid sequence alignment of the TFIIA large subunit sequences set forth in SEQ ID NOs: 292, 294, 296, 298, and 300, and the Arabidopsis thaliana TFIIA large subunit sequence (NCBI GenBank Identifier (GI) No. 2826884; SEQ ID NO: 373). SEQ ID NOs: 292, 294, 296, 298, and 300 exhibit 44%, 45%, 44%, 57%, and 57% identity, respectively, with SEQ ID NO: 373.

[0069] FIG. 11 depicts the amino acid sequence alignment of the TFIIA small subunit sequences set forth in SEQ ID NOs: 304, 306, 308, 310, 314, and 316, and the Arabidopsis thaliana TFIIA small subunit sequence (NCBI GenBank Identifier (GI) No. 2826882; SEQ ID NO: 374). SEQ ID NOs: 304, 306,308,310,314, and 316 exhibit 83%, 83%, 79%, 85%, 92%, and 84% identity, respectively, with SEQ ID NO: 374.

[0070] FIG. 12 depicts the amino acid sequence alignment of the PITP sequences set forth in SEQ ID NOs: 320, 324, 334, 340, and 352, and the Arabidopsis thaliana PITP sequence (NCBI GenBank Identifier (GI) No. 4914429; SEQ ID NO: 375). SEQ ID NOs: 320, 324, 334, 340, and 352 exhibit 51%, 50%, 53%, 69%, and 58% identity, respectively, with SEQ ID NO: 375.

[0071] In FIGS. 1-12, amino acids which are conserved among all and at least two sequences with an amino acid at that position are indicated with an asterisk (*). Dashes are used by the Megalign program to maximize alignment of the sequences. Sequence alignments and percent identity calculations were performed using the Megalign program of the LASERGENE bioinformatics computing suite (DNASTAR Inc., Madison, Wis.). Multiple alignment of the sequences was performed using the Clustal method of alignment (Higgins and Sharp (1989) CABIOS. 5:151-153) with the default parameters (GAP PENALTY=10, GAP LENGTH PENALTY=10). Default parameters for pairwise alignments using the Clustal method were KTUPLE 1, GAP PENALTY=3, WINDOW=5 and DIAGONALS SAVED=5.

[0072] B. Exemplary Utility of the Present Invention

[0073] The present invention provides utility in such exemplary applications as: engineering cell cycle progression, stress/pathogen response, protein/lipid transport, general level of gene expression and transcription, fatty acid and lipid levels, respiration levels, level of transcription regulated by specific transcription factors (YABBY, EREBP, and ACBF families of transcription factors), flower and carpel development, yield, biomass production, steroid hormone biosynthesis and responses, response to ethylene, vascular system-specific gene expression, isoflavone biosynthesis.

[0074] C. Exemplary Preferable Embodiments

[0075] While the various preferred embodiments are disclosed throughout the specification, exemplary preferable embodiments include the following: (i) cDNA libraries representing mRNAs from various barley (Hordeum vulgare), African daisy (Dimorphotheca sinuata), Eucalyptus tereticornis, para rubber (Hevea brasiliensis), cattail (Typha latifolia), Jerusalem artichoke (Helianthus tuberosus), Florida bitterbush (Picramnia pentandra), grape (Vitis sp.), vernonia (Vernonia mespilifolia), corn (Zea mays), rice (Oryza sativa), soybean (Glycine max), and wheat (Triticum aestivum) tissues were prepared. The characteristics of the libraries are described below.

TABLE 4
cDNA Libraries from Barley, African Daisy, Eucalyptus tereticornis,
Para Rubber, Cattail, Jerusalem Artichoke, Florida Bitterbush,
Grape, Vernonia, Corn¹, Rice, Soybean, and Wheat

| Library | Tissue | Clone |
|---|---|---|
| bsh1 | Barley Sheath, Developing Seedling | bsh1.pk0008.b7 |
| | | bsh1.pk0013.c3 |
| cbn10 | Corn Developing Kernel (Embryo and Endosperm); 10 Days | cbn10.pk0004.d5 |
| | After Pollination | cbn10.pk0004.g11 |
| | | cbn10.pk0007.c6 |
| | | cbn10.pk0049.f10 |
| | | cbn10.pk0061.d5 |
| cbn2n | Corn Developing Kernel Two Days After Pollination² | cbn2n.pk0002.h2 |
| cc1 | Corn Undifferentiated Callus | cc1.pk0026.b9 |
| cca | Corn Callus Type II Tissue, Undifferentiated, Highly | cca.pk0025.f4 |
| | Transformable | |
| ccase-b | Corn Callus Type II Tissue, Somatic Embryo Formed, Highly | ccase-b.pk0001.b2 |
| | Transformable | ccase-b.pk0002.d5 |
| cco1 | Corn Cob of 67 Day Old Plants Grown in Green House | cco1.pk0040.f2 |
| | | cco1.pk0047.h11 |
| cco1n | Corn Cob of 67 Day Old Plants Grown in Green House² | cco1n.pk0006.d9 |
| | | cco1n.pk0037.c3 |
| | | cco1n.pk054.k9 |
| | | cco1n.pk054.n4 |
| | | cco1n.pk071.f24 |
| | | cco1n.pk080.g6 |
| | | cco1n.pk087.j16 |
| cdo1c | Corn Ovary (Including Pedicel and Glumes), 5 Days After | cdo1c.pk002.a17 |
| | Silking | |
| ceb1 | Corn Embryo 10 to 11 Days After Pollination | ceb1.pk0039.e7 |
| | | ceb1.pk0094.e9 |
| ceb7f | Corn Embryo 15 to 30 Days After Pollination | ceb7f.pk003.n22 |
| cen1 | Corn Endosperm 10 to 11 Days After Pollination | cen1.pk0045.a8 |
| cen3n | Corn Endosperm 20 Days After Pollination² | cen3n.pk0053.d6 |
| | | cen3n.pk0058.h1 |
| | | cen3n.pk0095.g7 |
| | | cen3n.pk0125.f12 |
| | | cen3n.pk0144.e11 |
| | | cen3n.pk0151.g4 |
| | | cen3n.pk0161.b5 |
| | | cen3n.pk0178.e9 |
| ces1f | Corn Immature Ear Shoot, V19 | ces1f.pk004.i17 |
| cgs1c | Corn Sepal Tissue at Meiosis About 14 to 16 Days After | cgs1c.pk002.h6 |
| | Emergence (Site of Proline Synthesis That Supports Pollen | |
| | Development) | |
| chpc8 | Corn (MBS847) 8 Day Old Shoot Treated 8 Hours With | chpc8.pk0001.a11 |
| | Herbicide³. | chpc8.pk0003.c2 |
| cpc1c | Corn Pooled BMS Treated With Chemicals Related to | cpc1c.pk003.p15 |
| | cGMP⁴ | cpd1c.pk0l2.a12 |
| cpe1c | Corn Pooled BMS Treated With Chemicals Related to | cpe1c.pk001.m16 |
| | Phosphatase⁵ | cpe1c.pk011.d2 |
| cpf1c | Corn Pooled BMS Treated With Chemicals Related to | cpf1c.pk001.a4 |
| | Protein Synthesis⁶ | cpf1c.pk006.f21 |
| cph1c | Corn Pooled BMS Treated With Chemicals Related to Redox | cph1c.pk001.o15 |
| | Ratio⁷ | |
| cpi1c | Corn Pooled BMS Treated with Chemicals Related to | cpi1c.pk015.g7 |
| | Biochemical Compound Synthesis⁸ | |
| cpj1c | Corn Pooled BMS Treated With Chemicals Related to | cpj1c.pk001.m24 |
| | Membrane Ionic Force⁹ | cpj1c.pk004.g16 |
| cr1 | Corn Root From 7 Day Old Seedlings | cr1.pk0011.c1 |
| cr1bio | Corn Root From 7 Day Old Seedlings Grown in Light² | cr1bio.pk0006.d6 |
| cr1n | Corn Root From 7 Day Old Seedlings² | cr1n.pk0029.g1 |
| | | cr1n.pk0030.g6 |
| | | cr1n.pk0085.g2 |
| | | cr1n.pk0097.e12 |
| | | cr1n.pk0100.g9 |
| | | cr1n.pk0113.c3 |
| cs1 | Corn Leaf Sheath From 5 Week Old Plant | cs1.pk0082.c4 |
| csh3c | Corn Shoots and Roots Sprayed with Herbicide¹⁰ | csh3c.pk001.n24 |
| csi1 | Corn Silk | csi1.pk0013.g3 |
| csi1n | Corn Silk² | csi1n.pk0031.b7 |
| | | csi1n.pk0049.h2 |
| cta1n | Corn Tassel² | cta1n.pk0027.b9 |
| ctn1c | Corn Tassel, Night Harvested | ctn1c.pk001.d19 |
| dms1c | African Daisy Developing Seed | dms1c.pk001.p5 |
| eef1c | Eucalyptus tereticornis Flower Buds From Adult Tree | eef1c.pk005.c14 |
| | | eef1c.pk007.h7 |
| ehb2c | Para Rubber Tree (PR255) Latex Tapped in 2nd Day of 3 | ehb2c.pk006.f22 |
| | Day Tapping Cycle | ehb2c.pk013.n19 |
| etr1c | Cattail Root | etr1c.pk011.p10 |
| he1l | Jerusalem Artichoke Tuber | he1l.pk0013.c8 |
| p0005 | Corn Immature Ear | p0005.cbmei53r |
| | | p0005.cbmfb43r |
| p0008 | Corn Leaf, 3 Weeks Old | p0008.cb3ld47r |
| p0015 | Corn Embryo 13 Days After Pollination | p0015.cdpeg26r |
| | | p0015.cdpfd14rb |
| p0016 | Corn Tassel Shoots, Pooled, 0.1-1.4 cm | p0016.ctsad33r |
| | | p0016.ctsbz78r |
| p0018 | Corn Seedling After 10 Day Drought, Heat Shocked for 24 | p0018.chssr46rb |
| | Hours, Harvested After Recovery at Normal Growth | p0018.chstf54r |
| | Conditions for 8 Hours | |
| p0039 | Corn Vegetative Meristem | p0039.cvmag51r |
| p0040 | Corn Tassel | p0040.cftaa93r |
| p0041 | Corn Root Tips Smaller Than 5 mm in Length Four Days | p0041.crtap01r |
| | After Imbibition | |
| p0052 | Corn Cob Before Pollination, Some Pedicel and Kernel | p0052.ckhah16r |
| | Material Present | p0052.ckhak16r |
| p0059 | Corn Scutelar Node from Seeds Two and Three Days After | p0059.cmsbh07r |
| | Germination | |
| p0068 | Corn Pericarp 28 Days After Pollination | p0068.clsah90r |
| p0075 | Corn Shoot And Leaf Material From Dark-Grown 7 Day-Old | p0075.cslag46r |
| | Seedlings | |
| p0077 | Pollen From Corn GS3 Plants | p0077.cpoab24r |
| | | p0077.cpoad67r |
| | | p0077.cpoaj21r |
| p0081 | Corn Pedicel 10 Days After Pollination | p0081.chcaa15r |
| p0083 | Corn Whole Kernels 7 Days After Pollination | p0083.cldau06r |
| | | p0083.cldaz94r |
| | | p0083.clddg64r |
| | | p0083.clddi23r |
| | | p0083.clddl26r |
| | | p0083.cldem48r |
| | | p0083.clder38rb |
| p0094 | Corn Leaf Collars for the Ear Leaf (EL), and the Next Leaf | p0094.csstb82r |
| | Above and Below the EL; Growth Conditions: Field; Control | |
| | or Untreated Tissues² | |
| p0095 | Corn Ear Leaf Sheath; Growth Conditions: Field; Control or | p0095.cwsas06r |
| | Untreated Tissues; Growth Stage: 2-3 weeks After Pollen | |
| | Shed² | |
| p0097 | Corn V9 Whorl Section (7 cm) From Plant Infected Four | p0097.cqrab20r |
| | Times With European Corn Borer | |
| p0098 | Ear Shoot, Prophase I (2.8-4.8 cm)² | p0098.cdfae47r |
| p0102 | Corn Early Meiosis Tassels² | p0102.ceray51r |
| p0104 | Corn Roots V5, Corn Root Worm Infested² | p0104.cabak40r |
| p0107 | Corn Whole Kernels 7 Days After Pollination² | p0107.cbcaq06r |
| p0109 | Corn Leaves From Les9 Mutant; Pool of Les9 Transition | p0109.cdadd47r |
| | Zone + Les9 Mature Lesions² | |
| p0115 | Corn Leaf and Sheath Meristem Tissue Collected | p0115.clsmm93r |
| | from 10th, 11th, and 12th Leaves² | |
| p0116 | DAM Methylase Induced Transgenic Corn BMS Suspension | p0116.cesaj63r |
| | Cells² | |
| p0118 | Corn Stem Tissue Pooled From the 4-5 Internodes | p0118.chsbm24r |
| | Subtending The Tassel At Stages V8-V12, Night Harvested² | |
| p0125 | Corn Anther Prophase I² | p0125.czaaj01r |
| p0126 | Corn Leaf Tissue From V8-V10 Stages, Pooled, Night- | p0126.cnlaz32r |
| | Harvested | p0126.cnlbg89r |
| | | p0126.cnldd44r |
| p0127 | Corn Nucellus Tissue, 5 Days After Silking² | p0127.cntak21r |
| | | p0127.cntbd60r |
| p0128 | Corn Primary and Secondary Immature Ear | p0128.cpibn44r |
| | | p0128.cpiby92r |
| | | p0128.cpicc94r |
| | | p0128.cpico20r |
| p0134 | Regenerating Corn Hi-II 223a, 1129e Callus 10 Days and 14 | p0134.carab02r |
| | Days After Auxin Removal | |
| pps | Developing Seeds of Florida Bitterbush | pps.pk0007.h8 |
| rca1c | Rice Nipponbare Callus | rca1c.pk0004.d10 |
| rcaln | Rice Callus² | rca1n.pk012.b24 |
| | | rca1n.pk025.b22 |
| | | rca1n.pk027.i5 |
| rdr1f | Rice Developing Root of 10 Day Old Plant | rdr1f.pk001.f2 |
| rds1c | Rice Developing Seed | rds1c.pk006.a3 |
| | | rds1c.pk007.h14 |
| rds2c | Rice Developing Seed From Middle of the Plant | rds2c.pk004.h9 |
| | | rds2c.pk005.e5 |
| | | rds2c.pk006.b20 |
| | | rds2c.pk008.o15 |
| rds3c | Rice Developing Seed From Top of the Plant | rds3c.pk001.b10 |
| res1c | Rice Etiolated Seedling | res1c.pk004.e6 |
| r10n | Rice 15 Day Old Leaf² | r10n.pk0031.e10 |
| | | r10n.pk096.h12 |
| | | r10n.pk096.k13 |
| rlm1n | Rice Leaf 15 Days After Germination Harvested 2-72 Hours | rlm1n.pk001.e13 |
| | Following Infection With Magnaporta grisea (4360-R-62 and | |
| | 4360-R-67)² | |
| rlr12 | Resistant Rice Leaf 15 Days After Germination, 12 Hours | rln12.pk0013.h12 |
| | After Infection of Strain Magnaporthe grisea 4360-R-62 | |
| | (AVR2-YAMO) | |
| rlr2 | Resistant Rice Leaf 15 Days After Germination, 2 Hours | rlr2.pk0005.a12 |
| | After Infection of Strain Magnaporthe grisea 4360-R-62 | |
| | (AVR2-YAMO) | |
| rlr24 | Resistant Rice Leaf 15 Days After Germination, 24 Hours | rlr24.pk0002.b3 |
| | After Infection of Strain Magnaporthe grisea 4360-R-62 | rlr24.pk0080.b1 |
| | (AVR2-YAMO) | |
| rlr48 | Resistant Rice Leaf 15 Days After Germination, 48 Hours | rlr48.pk0014.a12 |
| | After Infection of Strain Magnaporthe grisea 4360-R-62 | |
| | (AVR2-YAMO) | |
| rls12 | Susceptible Rice Leaf 15 Days After Germination, 12 hours | rls12.pk0001.d2 |
| | After Infection of Strain Magnaporthe grisea 4360-R-67 | |
| | (AVR2-YAMO) | |
| rls48 | Susceptible Rice Leaf 15 Days After Germination, 48 Hours | rls48.pk0018.d5 |
| | After Infection of Strain Magnaporthe grisea 4360-R-67 | |
| | (AVR2-YAMO) | |
| rls6 | Susceptible Rice Leaf 15 Days After Germination, 6 Hours | rls6.pk0062.d5 |
| | After Infection of Strain Magnaporthe grisea 4360-R-67 | rls6.pk0076.e6 |
| | (AVR2-YAMO) | rls6.pk0077.c1 |
| rr1 | Rice Root of Two Week Old Developing Seedling | rr1.pk0027.f11 |
| | | rr1.pk0068.d6 |
| | | rr1.pk078.c2 |
| | | rr1.pk079.o4 |
| | | rr1.pk098.p24 |
| rsl1n | Rice 15-Day-Old Seedling² | rsl1n.pk002.f6 |
| | | rsl1n.pk010.j9 |
| | | rsl1n.pk010.l3 |
| rsr9n | Rice Leaf 15 Days After Germination Harvested 2-72 Hours | rsr9n.pk001.c9 |
| | Following Infection With Magnaporta grisea (4360-R-62 and | rsr9n.pk002.i20 |
| | 4360-R-67)² | |
| sah1c | Soybean Sprayed With Authority ™ Herbicide | sah1c.pk004.c9 |
| scn1c | Soybean Embryogenic Suspension Culture Collected 10 | scn1c.pk001.i15 |
| | Months Old (Necrotic Tissue) | |
| scn1c | Soybean Embryogenic Suspension Culture Subjected to 4 | scr1c.pk002.k6 |
| | Vacuum Cycles and Collected 12 Hrs Later | |
| sdp2c | Soybean Developing Pod (6-7 mm) | sdp2c.pk026.i5 |
| sdp3c | Soybean Developing Pod (8-9 mm) | sdp3c.pk006.m7 |
| | | sdp3c.pk017.m12 |
| sdp4c | Soybean Developing Pod (10-12 mm) | sdp4c.pk002.n23 |
| | | sdp4c.pk006.h12 |
| se1 | Soybean Embryo, 6 to 10 Days After Flowering | se1.pk0003.d4 |
| | | se1.pk0029.g11 |
| se3 | Soybean Embryo, 17 Days After Flowering | se3.pk0033.a12 |
| se5 | Soybean Embryo, 21 Days After Flowering | se5.pk0029.b12 |
| ses2w | Soybean Embryogenic Suspension 2 Weeks After Subculture | ses2w.pk0013.d6 |
| | | ses2w.pk0015.c12 |
| sfl1 | Soybean Immature Flower | sfl1.pk0024.e2 |
| | | sfl1.pk0034.f3 |
| | | sfl1.pk0038.c9 |
| | | sfl1.pk0060.f3 |
| | | sfl1.pk0074.g3 |
| | | sfl1.pk0095.fl1 |
| | | sfl1.pk131.f9 |
| sfl1n | Soybean Immature Flower² | sfl1n.pk001.d4 |
| sfl1n1 | Soybean Immature Flower² | sfl1n1.pk001.o20 |
| sgc2c | Soybean Cotyledon 12-20 Days After Germination (Mature | sgc2c.pk001.o9 |
| | Green) | |
| sgc6c | Soybean Cotyledon 16-26 Days After Germination (All | sgc6c.pk001.e12 |
| | Yellow) | |
| sgc7c | Soybean Cotyledon 18-30 Days After Germination (Yellow | sgc7c.pk001.e20 |
| | and Wilting) | |
| sgs2c | Soybean Seed 14 Hours After Germination | sgs2c.pk002.g7 |
| | | sgs2c.pk003.n17 |
| | | sgs2c.pk004.e8 |
| | | sgs2c.pk004.h19 |
| | | sgs2c.pk004.k10 |
| s12 | Soybean Two-Week-Old Developing Seedling Treated With | s12.pk0051.d3 |
| | 2.5 ppm Chlorimuron | s12.pk131.h2 |
| sls1c | Soybean (variety S1990) Infected With Sclerotinia | sls1c.pk008.p15 |
| | sclerotiorurn Mycelium | sls1c.pk023.d12 |
| sls2c | Soybean (variety Manta) Infected With Sclerotinia | sls2c.pk001.i8 |
| | sclerotiorum Mycelium | |
| sml1c | Soybean Mature Leaf | sml1c.pk001.m24 |
| sr1 | Soybean Root | sr1.pk0016.d3 |
| | | sr1.pk0051.e6 |
| src2c | Soybean 8 Day Old Root Infected With Eggs of Cyst | src2c.pk002.o23 |
| | Nematode (Heteroderea glycensis) (Race 1) for 4 Days | |
| src3c | Soybean 8 Day Old Root Infected With Cyst Nematode | src3c.pk011.h11 |
| srr3c | Soybean 8-Day-Old Root | srr3c.pk001.e1 |
| | | srr3c.pk002.n22 |
| ss1 | Soybean Seedling 5-10 Days After Germination | ss1.pk0060.d4 |
| ssl1c | Soybean (Transgenic High Lysine Line 5403-218) Seed 25 | ssl1c.pk002.k23 |
| | Days After Fertilization | ssl1c.pk005.i17 |
| ssm | Soybean Shoot Meristem | ssm.pk0001.b11 |
| | | ssm.pk0020.f6 |
| | | ssm.pk0033.c10 |
| vdb1c | Grape Developing Bud | vdb1c.pk009.b9 |
| | | vdb1c.pk010.j20 |
| vs1n | Vernonia Seed² | vs1n.pk013.j18 |
| | | vs1n.pk014.n9 |
| wdk1c | Wheat Developing Kernel, 3 Days After Anthesis | wdk1c.pk012.j14 |
| wdk2c | Wheat Developing Kernel, 7 Days After Anthesis | wdk2c.pk0004.c5 |
| | | wdk2c.pk007.c14 |
| | | wdk2c.pk013.e14 |
| | | wdk2c.pk013.l7 |
| | | wdk2c.pk017.c19 |
| | | wdk2c.pk017.c3 |
| wdk3c | Wheat Developing Kernel, 14 Days After Anthesis | wdk3c.pk0003.a5 |
| | | wdk3c.pk006.d12 |
| | | wdk3c.pk012.h14 |
| wdk9n | Wheat Kernels 3, 7, 14 and 21 Days After Anthesis | wdk9n.pk001.p2 |
| wdk9n1 | Wheat Kernels 3, 7, 14 and 21 Days After Anthesis² | wdk9n1.pk001.n20 |
| wdr1f | Wheat Developing Root | wdr1f.pk003.l5 |
| wkm2n | Wheat Kernel Malted 175 Hours at 4° C.² | wkm2n.pk008.p10 |
| wl1 | Wheat Leaf From 7 Day Old Seedling Light Grown | wl1.pk0008.h10 |
| | | wl1.pk0012.b6 |
| wl1n | Wheat Leaf From 7 Day Old Seedling Light Grown² | wl1n.pk0024.g3 |
| | | wl1n.pk0102.e9 |
| wle1 | Wheat Leaf From 7 Day Old Etiolated Seedling | wle1.pk0003.a8 |
| | | wle1.pk0002.c10 |
| wle1n | Wheat Leaf From 7 Day Old Etiolated Seedling² | wle1n.pk0004.d6 |
| | | wle1n.pk0043.a10 |
| | | wle1n.pk0058.f3 |
| wlk1 | Wheat Seedling 1 Hour After Treatment With Herbicide¹¹ | wlk1.pk0001.f8 |
| w1m0 | Wheat Seedling 0 Hour After Inoculation With Erysiphe | wlm0.pk0009.g9 |
| | graminis f. sp tritici | wlm0.pk0018.f3 |
| wlm1 | Wheat Seedling 1 Hour After Inoculation With Erysiphe | wlm1.pk0008.c11 |
| | graminis f. sp tritici | wlm1.pk0015.c4 |
| wlm24 | Wheat Seedling 24 Hours After Inoculation With Erysiphe | wlm24.pk0031.c1 |
| | graminis f. sp tritici | |
| wlm4 | Wheat Seedling 4 Hours After Inoculation With Erysiphe | wlm4.pk0003.g1 |
| | graminis f. sp tritici | wlm4.pk0009.a8 |
| wlm96 | Wheat Seedling 96 Hours After Inoculation With Erysiphe | wlm96.pk0007.a5 |
| | graminis f. sp tritici | wlm96.pk0020.d2 |
| | | wlm96.pk030.m18 |
| | | wlm96.pk031.g10 |
| | | wlm96.pk054.b17 |
| | | wlm96.pk061.l12 |
| wlmk1 | Wheat Seedling 1 Hour After Inoculation With Erysiphe | wlmk1.pk0010.e2 |
| | graminis f. sp tritici and Treatment With Herbicide¹¹ | |
| wlmk8 | Wheat Seedling 8 Hours After Inoculation With Erysiphe | wlmk8.pk0019.f6 |
| | graminis f. sp tritici and Treatment With Herbicide¹¹ | |
| wr1 | Wheat Root From 7 Day Old Seedling Light Grown | wr1.pk0055.a12 |
| | | wr1.pk0068.h1 |
| | | wr1.pk0096.h7 |
| | | wr1.pk164.e12 |
| | | wr1.pk167.c6 |
| | | wr1.pk178.b2 |
| wre1n | Wheat Root From 7 Day Old Etiolated Seedling² | wre1n.pk0059.b9 |
| | | wre1n.pk0104.f4 |
| | | wre1n.pk183.h2 |
| wyr1c | Wheat Yellow Rust Infested Tissue | wyr1c.pk003.b6 |

¹Corn developmental stages are explained in the publication “How a corn plant develops”from the Iowa State University Coop. Ext. Service Special Report No. 48 reprinted June 1993.
²These libraries were normalized essentially as described in U.S. Pat. No. 5,482,845, incorporated herein by reference.
³Application of 2-[(2,4-dihydro-2,6,9-trimethyl[1]benzothiopyrano[4,3-c]pyrazol-8-yl)carbonyl]-1,3-cyclohexanedione S,S-dioxide (synthesis and methods of using this compound are described in WO 97/19087, incorporated herein by reference)
⁴Chemicals used included suramin, MAS7, dipyridamole, zaprinast, 8-bromo-cGMP, trequinsin HCl, compound 48/80, all of which are commercially available from Calbiochem-Novabiochem Corp. (1-800-628-8470)
⁵Chemicals used included okadaic acid, cyclosporin A, calyculin A, cypermethrin, all of which are commercially available from Calbiochem-Novabiochem Corp. (1-800-628-8470)
⁶Chemicals used included chloramphenicol, cyclohexamide, aurintricarboxylic acid, all of which are commercially available from Calbiochem-Novabiochem Corp. (1-800-628-8470)
⁷Chemicals used included diphenylene iodonium Cl, H₂O₂, paraquat, glutathione, N-acetyl-L-cysteine, aminotriazole, all of which are commercially available from Calbiochem-Novabiochem Corp. (1-800-628-8470)
⁸Chemicals used included sorbitol, egosterol, taxifolin, methotrexate, D-mannose, D-galactose, alpha-amino adipic acid, ancymidol, all of which are commercially available from Calbiochem-Novabiochem Corp. (1-800-628-8470)
⁹Chemicals used included valinomycin, bafilomycin AI, oligomycin, ionomycin, all of which are commercially available from Calbiochem-Novabiochem Corp. (1-800-628-8470)
¹⁰Application of N-(3,6-dihydro-2H-pyran-4-yl)-4-(3,5-dimethyl-4-isoxazolyl)-4,5-dihydro-N-(1-methylethyl)-5-oxo-1H-tetrazole-1-carboxamide (synthesis and methods of using this compound are described in WO98/35961, incorporated herein by reference)
¹¹Application of 6-iodo-2-propoxy-3-propyl-4(3H)-quinazolinone (synthesis and methods of using this compound are described in USSN 08/545,827, incorporated herein by reference)

[0076] Soybean clone sne1x.pk004.j22 was derived from library snelx, which is a soybean (variety Tokyo) nebulized genomic library.

[0077] cDNA libraries may be prepared by any one of many methods available. For example, the cDNAs may be introduced into plasmid vectors by first preparing the cDNA libraries in Uni-ZAP™ XR vectors according to the manufacturer's protocol (Stratagene Cloning Systems, La Jolla, Calif.). The Uni-ZAP™ XR libraries are converted into plasmid libraries according to the protocol provided by Stratagene. Upon conversion, cDNA inserts will be contained in the plasmid vector pBluescript. In addition, the cDNAs may be introduced directly into precut Bluescript II SK(+) vectors (Stratagene) using T4 DNA ligase (New England Biolabs), followed by transfection into DH10B cells according to the manufacturer's protocol (GIBCO BRL Products). Once the cDNA inserts are in plasmid vectors, plasmid DNAs are prepared from randomly picked bacterial colonies containing recombinant pBluescript plasmids, or the insert cDNA sequences are amplified via polymerase chain reaction using primers specific for vector sequences flanking the inserted cDNA sequences. Amplified insert DNAs or plasmid DNAs are sequenced in dye-primer sequencing reactions to generate partial cDNA sequences (expressed sequence tags or “ESTs”; see Adams et al., (1991) Science 252:1651-1656). The resulting ESTs are analyzed using a Perkin Elmer Model 377 fluorescent sequencer.

[0078] Definitions

[0079] Units, prefixes, and symbols may be denoted in their SI accepted form. Unless otherwise indicated, nucleic acids are written left to right in 5′ to 3′ orientation; amino acid sequences are written left to right in amino to carboxy orientation, respectively. Numeric ranges recited within the specification are inclusive of the numbers defining the range and include each integer within the defined range. Amino acids may be referred to herein by either their commonly known three letter symbols or by the one-letter symbols recommended by the IUPAC-IUBMB Nomenclature Commission. Nucleotides, likewise, may be referred to by their commonly accepted single-letter codes. Unless otherwise provided for, software, electrical, and electronics terms as used herein are as defined in The New IEEE Standard Dictionary of Electrical and Electronics Terms (5^{th} edition, 1993). The terms defined below are more fully defined by reference to the specification as a whole. Section headings provided throughout the specification are not limitations to the various objects and embodiments of the present invention.

[0080] By “amplified” is meant the construction of multiple copies of a nucleic acid sequence or multiple copies complementary to the nucleic acid sequence using at least one of the nucleic acid sequences as a template. Amplification systems include the polymerase chain reaction (PCR) system, ligase chain reaction (LCR) system, nucleic acid sequence based amplification (NASBA, Cangene, Mississauga, Ontario), Q-Beta Replicase systems, transcription-based amplification system (TAS), and strand displacement amplification (SDA). See, e.g., Diagnostic Molecular Microbiology: Principles and Applications, D. H. Persing et al., Ed., American Society for Microbiology, Washington, D.C. (1993). The product of amplification is termed an amplicon.

[0081] As used herein, “antisense orientation” includes reference to a duplex polynucleotide sequence that is operably linked to a promoter in an orientation where the antisense strand is transcribed. The antisense strand is sufficiently complementary to an endogenous transcription product such that translation of the endogenous transcription product is often inhibited.

[0082] By “encoding” or “encoded”, with respect to a specified nucleic acid, is meant comprising the information for translation into the specified protein. A nucleic acid encoding a protein may comprise intervening sequences (e.g., introns) within translated regions of the nucleic acid, or may lack such intervening sequences (e.g., as in cDNA). The information by which a protein is encoded is specified by the use of codons. Typically, the amino acid sequence is encoded by the nucleic acid using the “universal” genetic code. However, variants of the universal code, such as are present in some plant, animal, and fungal mitochondria, the bacterium Mycoplasma capricolum, or the ciliate Macronucleus, may be used when the nucleic acid is expressed therein.

[0083] When the nucleic acid is prepared or altered synthetically, advantage can be taken of known codon preferences of the intended host where the nucleic acid is to be expressed. For example, although nucleic acid sequences of the present invention may be expressed in both monocotyledonous and dicotyledonous plant species, sequences can be modified to account for the specific codon preferences and C-C content preferences of monocotyledons or dicotyledons as these preferences have been shown to differ (Murray et al., Nucl. Acids Regs. 17:477-498 (1989)). Thus, the maize preferred codon for a particular amino acid may be derived from known gene sequences from maize. Maize codon usage for 28 genes from maize plants is listed in Table 4 of Murray et al., supra.

[0084] As used herein “full-length sequence” in reference to a specified polynucleotide or its encoded protein means having the entire amino acid sequence of, a native (non-synthetic), endogenous, biologically (e.g., structurally or catalytically) active form of the specified protein. Methods to determine whether a sequence is fill-length are well known in the art including such exemplary techniques as northern or western blots, primer extension, S1 protection, and ribonuclease protection. See, e.g., Plant Molecular Biology: A Laboratory Manual, Clark, Ed., Springer-Verlag, Berlin (1997). Comparison to known full-length homologous (orthologous and/or paralogous) sequences can also be used to identify full-length sequences of the present invention. Additionally, consensus sequences typically present at the 5′ and 3′ untranslated regions of mRNA aid in the identification of a polynucleotide as full-length. For example, the consensus sequence ANNNNAUGG, where the underlined codon represents the N-terminal methionine, aids in determining whether the polynucleotide has a complete 5′ end. Consensus sequences at the 3′ end, such as polyadenylation sequences, aid in determining whether the polynucleotide has a complete 3′ end.

[0085] As used herein, “heterologous” in reference to a nucleic acid is a nucleic acid that originates from a foreign species, or, if from the same species, is substantially modified from its native form in composition and/or genomic locus by human intervention. For example, a promoter operably linked to a heterologous structural gene is from a species different from that from which the structural gene was derived, or, if from the same species, one or both are substantially modified from their original form. A heterologous protein may originate from a foreign species or, if from the same species, is substantially modified from its original form by human intervention.

[0086] By “host cell” is meant a cell which contains a vector and supports the replication and/or expression of the vector. Host cells may be prokaryotic cells such as E. coli, or eukaryotic cells such as yeast, insect, amphibian, or mammalian cells. Preferably, host cells are monocotyledonous or dicotyledonous plant cells. A particularly preferred monocotyledonous host cell is a maize host cell.

[0087] The term “introduced” includes reference to the incorporation of a nucleic acid into a eukaryotic or prokaryotic cell where the nucleic acid may be incorporated into the genome of the cell (e.g., chromosome, plasmid, plastid or mitochondrial DNA), converted into an autonomous replicon, or transiently expressed (e.g., transfected mRNA). The term includes such nucleic acid introduction means as “transfection”, “transformation” and “transduction”.

[0088] The term “isolated” refers to material, such as a nucleic acid or a protein, which is substantially free from components that normally accompany or interact with it as found in its naturally occurring environment. The isolated material optionally comprises material not found with the material in its natural environment, or if the material is in its natural environment, the material has been synthetically (non-naturally) altered by human intervention to a composition and/or placed at a location in the cell (e.g., genome or subcellular organelle) not native to a material found in that environment. The alteration to yield the synthetic material can be performed on the material within or removed from its natural state. For example, a naturally occurring nucleic acid becomes an isolated nucleic acid if it is altered, or if it is transcribed from DNA which has been altered, by means of human intervention performed within the cell from which it originates. See, e.g., Compounds and Methods for Site Directed Mutagenesis in Eukaryotic Cells, Kmiec, U.S. Pat. No. 5,565,350; In Vivo Homologous Sequence Targeting in Eukaryotic Cells; Zarling et al., PCT/US93/03868. Likewise, a naturally occurring nucleic acid (e.g., a promoter) becomes isolated if it is introduced by non-naturally occurring means to a locus of the genome not native to that nucleic acid. Nucleic acids which are “isolated” as defined herein, are also referred to as “heterologous” nucleic acids.

[0089] As used herein, “nucleic acid” includes reference to a deoxyribonucleotide or ribonucleotide polymer, or chimeras thereof, in either single- or double-stranded form, and unless otherwise limited, encompasses known analogues having the essential nature of natural nucleotides in that they hybridize to single-stranded nucleic acids in a manner similar to naturally occurring nucleotides (e.g., peptide nucleic acids).

[0090] By “nucleic acid library” is meant a collection of isolated DNA or RNA molecules which comprise and substantially represent the entire transcribed fraction of a genome of a specified organism, tissue, or of a cell type from that organism. Construction of exemplary nucleic acid libraries, such as genomic and cDNA libraries, is taught in standard molecular biology references such as Berger and Kimmel, Guide to Molecular Cloning Techniques, Methods in Enzymology, Vol. 152, Academic Press, Inc., San Diego, Calif. (Berger); Sambrook et al., Molecular Cloning-A Laboratory Manual, 2nd ed., Vol. 1-3 (1989); and Current Protocols in Molecular Biology, F. M. Ausubel et al., Eds., Current Protocols, a joint venture between Greene Publishing Associates, Inc. and John Wiley & Sons, Inc. (1994).

[0091] As used herein “operably linked” includes reference to a functional linkage between a promoter and a second sequence, wherein the promoter sequence initiates and mediates transcription of the DNA sequence corresponding to the second sequence. Generally, operably linked means that the nucleic acid sequences being linked are contiguous and, where necessary to join two protein coding regions, contiguous and in the same reading frame.

[0092] As used herein, the term “plant” includes reference to whole plants, plant organs (e.g., leaves, stems, roots, etc.), seeds and plant cells and progeny of same. Plant cell, as used herein includes, without limitation, seeds, suspension cultures, embryos, meristematic regions, callus tissue, leaves, roots, shoots, gametophytes, sporophytes, pollen, and microspores. The class of plants which can be used in the methods of the invention include both monocotyledonous and dicotyledonous plants. Particularly preferred plants include corn (Zea mays), rice (Oryza sativa), soybean (Glycine max), and wheat (Triticum aestivurm).

[0093] As used herein, “polynucleotide” includes reference to a deoxyribopolynucleotide, ribopolynucleotide, or chimeras or analogs thereof that have the essential nature of a natural deoxy- or ribo- nucleotide in that they hybridize, under stringent hybridization conditions, to substantially the same nucleotide sequence as naturally occurring nucleotides and/or allow translation into the same amino acid(s) as the naturally occurring nucleotide(s). A polynucleotide can be full-length or a subsequence of a native or heterologous structural or regulatory gene. Unless otherwise indicated, the term includes reference to the specified sequence as well as the complementary sequence thereof. Thus, DNAs or RNAs with backbones modified for stability or for other reasons are “polynucleotides” as that term is intended herein. Moreover, DNAs or RNAs comprising unusual bases, such as inosine, or modified bases, such as tritylated bases, to name just two examples, are polynucleotides as the term is used herein. It will be appreciated that a great variety of modifications have been made to DNA and RNA that serve many useful purposes known to those of skill in the art. The term polynucleotide as it is employed herein embraces such chemically, enzymatically or metabolically modified forms of polynucleotides, as well as the chemical forms of DNA and RNA characteristic of viruses and cells, including among other things, simple and complex cells.

[0094] The terms “polypeptide”, “peptide” ard “protein” are used interchangeably herein to refer to a polymer of amino acid residues. The terms apply to amino acid polymers in which one or more amino acid residue is an artificial chemical analogue of a corresponding naturally occurring amino acid, as well as to naturally occurring amino acid polymers. The essential nature of such analogues of naturally occurring amino acids is that, when incorporated into a protein, that protein is specifically reactive to antibodies elicited to the same protein but consisting entirely of naturally occurring amino acids. The terms “polypeptide”, “peptide” and “protein” are also inclusive of modifications including, but not limited to, glycosylation, lipid attachment, sulfation, gamma-carboxylation of glutamic acid residues, hydroxylation and ADP-ribosylation. Further, this invention contemplates the use of both the methionine-containing and the methionine-less amino terminal variants of the protein of the invention.

[0095] As used herein “promoter” includes reference to a region of DNA upstream from the start of transcription and involved in recognition and binding of RNA polymerase and other proteins to initiate transcription. A “plant promoter” is a promoter capable of initiating transcription in plant cells whether or not its origin is a plant cell. Exemplary plant promoters include, but are not limited to, those that are obtained from plants, plant viruses, and bacteria which comprise genes expressed in plant cells such Agrobacterium or Rhizobium. Examples of promoters under developmental control include promoters that preferentially initiate transcription in certain tissues, such as leaves, roots, or seeds. Such promoters are referred to as “tissue preferred”. Promoters which initiate transcription only in certain tissue are referred to as “tissue specific”. A “cell type” specific promoter primarily drives expression in certain cell types in one or more organs, for example, vascular cells in roots or leaves. An “inducible” or “repressible” promoter is a promoter which is under environmental control. Examples of environmental conditions that may effect transcription by inducible promoters include anaerobic conditions or the presence of light. Tissue specific, tissue preferred, cell type specific, and inducible promoters constitute the class of “non-constitutive” promoters. A “constitutive” promoter is a promoter which is active under most environmental conditions.

[0096] As used herein “recombinant” includes reference to a cell or vector, that has been modified by the introduction of a heterologous nucleic acid or that the cell is derived from a cell so modified. Thus, for example, recombinant cells express genes that are not found in identical form within the native (non-recombinant) form of the cell or express native genes that are otherwise abnormally expressed, under-expressed or not expressed at all as a result of human intervention. The term “recombinant” as used herein does not encompass the alteration of the cell or vector by naturally occurring events (e.g., spontaneous mutation, natural transformation/transduction/transposition) such as those occurring without human intervention.

[0097] As used herein, a “recombinant expression cassette” is a nucleic acid construct, generated recombinantly or synthetically, with a series of specified nucleic acid elements which permit transcription of a particular nucleic acid in a host cell. The recombinant expression cassette can be incorporated into a plasmid, chromosome, mitochondrial DNA, plastid DNA, virus, or nucleic acid fragment. Typically, the recombinant expression cassette portion of an expression vector includes, among other sequences, a nucleic acid to be transcribed, and a promoter.

[0098] The term “residue” or “amino acid residue” or “amino acid” are used interchangeably herein to refer to an amino acid that is incorporated into a protein, polypeptide, or peptide (collectively “protein”). The amino acid may be a naturally occurring amino acid and, unless otherwise limited, may encompass non-natural analogs of natural amino acids that can function in a similar manner as naturally occurring amino acids.

[0099] The term “selectively hybridizes” includes reference to hybridization, under stringent hybridization conditions, of a nucleic acid sequence to a specified nucleic acid target sequence to a detectably greater degree (e.g., at least 2-fold over background) than its hybridization to non-target nucleic acid sequences and to the substantial exclusion of non-target nucleic acids. Selectively hybridizing sequences typically have about at least 80% sequence identity, preferably 90% sequence identity, and most preferably 100% sequence identity (i.e., complementary) with each other.

[0100] The term “stringent conditions” or “stringent hybridization conditions” includes reference to conditions under which a probe will selectively hybridize to its target sequence, to a detectably greater degree than to other sequences (e.g., at least 2-fold over background). Stringent conditions are sequence-dependent and will be different in different circumstances. By controlling the stringency of the hybridization and/or washing conditions, target sequences can be identified which are 100% complementary to the probe (homologous probing). Alternatively, stringency conditions can be adjusted to allow some mismatching in sequences so that lower degrees of similarity are detected (heterologous probing). Generally, a probe is less than about 1000 nucleotides in length, optionally less than 500 nucleotides in length.

[0101] Typically, stringent conditions will be those in which the salt concentration is less than about 1.5 M Na ion, typically about 0.01 to 1.0 M Na ion concentration (or other salts) at pH 7.0 to 8.3 and the temperature is at least about 30° C. for short probes (e.g., 10 to 50 nucleotides) and at least about 60° C. for long probes (e.g., greater than 50 nucleotides). Stringent conditions may also be achieved with the addition of destabilizing agents such as formamide. Exemplary low stringency conditions include hybridization with a buffer solution of 30 to 35% formamide, 1 M NaCl, 1% SDS (sodium dodecyl sulphate) at 37° C., and a wash in 1× to 2×SSC (20×SSC=3.0 M NaCl/0.3 M trisodium citrate) at 50 to 55° C. Exemplary moderate stringency conditions include hybridization in 40 to 45% formamide, 1 M NaCl, 1% SDS at 37° C., and a wash in 0.5× to 1×SSC at 55 to 60° C. Exemplary high stringency conditions include hybridization in 50% formamide, 1 M NaCl, 1% SDS at 37° C., and a wash in 0.×SSC at 60 to 65° C.

[0102] Specificity is typically the function of post-hybridization washes, the critical factors being the ionic strength and temperature of the final wash solution. For DNA-DNA hybrids, the Tₘ can be approximated from the equation of Meinkoth and Wahl, Anal. Biochem., 138:267-284 (1984): Tₘ=81.5° C.+16.6 (log M)+0.41 (% GC)−0.61 (% form)−500/L; where M is the molarity of monovalent cations, % GC is the percentage of guanosine and cytosine nucleotides in the DNA, % form is the percentage of formamide in the hybridization solution, and L is the length of the hybrid in base pairs. The Tₘ is the temperature (under defined ionic strength and pH) at which 50% of a complementary target sequence hybridizes to a perfectly matched probe. Tₘ is reduced by about 1° C. for each 1% of mismatching; thus, Tₘ, hybridization and/or wash conditions can be adjusted to hybridize to sequences of the desired identity. For example, if sequences with ≧90% identity are sought, the Tₘ can be decreased 10° C. Generally, stringent conditions are selected to be about 5° C. lower than the thermal melting point (Tₘ) for the specific sequence and its complement at a defined ionic strength and pH. However, severely stringent conditions can utilize a hybridization and/or wash at 1, 2, 3, or 4° C. lower than the thermal melting point (Tₘ); moderately stringent conditions can utilize a hybridization and/or wash at 6, 7, 8, 9, or 10° C. lower than the thermal melting point (Tₘ); low stringency conditions can utilize a hybridization and/or wash at 11, 12, 13, 14, 15, or 20° C. lower than the thermal melting point (Tₘ). Using the equation, hybridization and wash compositions, and desired Tₘ, those of ordinary skill will understand that variations in the stringency of hybridization and/or wash solutions are inherently described. If the desired degree of mismatching results in a Tₘ of less than 45° C. (aqueous solution) or 32° C. (formamide solution) it is preferred to increase the SSC concentration so that a higher temperature can be used. Hybridization and/or wash conditions can be applied for at least 10, 30, 60, 90, 120, or 240 minutes. An extensive guide to the hybridization of nucleic acids is found in Tijssen, Laboratory Techniques in Biochemistry and Molecular Biology—Hybridization with Nlucleic Acid Probes, Part I, Chapter 2 “Overview of principles of hybridization and the strategy of nucleic acid probe assays”, Elsevier, N.Y. (1993); and Current Protocols in Molecular Biology, Chapter 2, Ausubel et al., Eds., Greene Publishing and Wiley-Interscience, New York (1995).

[0103] As used herein, “transgenic plant” includes reference to a plant which comprises within its genome a heterologous polynucleotide. Generally, the heterologous polynucleotide is stably integrated within the genome such that the polynucleotide is passed on to successive generations. The heterologous polynucleotide may be integrated into the genome alone or as part of a recombinant expression cassette. “Transgenic” is used herein to include any cell, cell line, callus, tissue, plant part or plant, the genotype of which has been altered by the presence of heterologous nucleic acid including those transgenics initially so altered as well as those created by sexual crosses or asexual propagation from the initial transgenic. The term “transgenic” as used herein does not encompass the alteration of the genome (chromosomal or extra-chromosomal) by conventional plant breeding methods or by naturally occurring events such as random cross-fertilization, non-recombinant viral infection, non-recombinant bacterial transformation, non-recombinant transposition, or spontaneous mutation.

[0104] As used herein, “vector” includes reference to a nucleic acid used in introduction of a polynucleotide of the present invention into a host cell. Vectors are often replicons. Expression vectors permit transcription of a nucleic acid inserted therein.

[0105] The following terms are used to describe the sequence relationships between a polynucleotide/polypeptide of the present invention with a reference polynucleotide/polypeptide: (a) “reference sequence”, (b) “comparison window”, (c) “sequence identity”, and (d) “percentage of sequence identity”.

[0106] (a) As used herein, “reference sequence” is a defined sequence used as a basis for sequence comparison with a polynucleotide/polypeptide of the present invention. A reference sequence may be a subset or the entirety of a specified sequence; for example, as a segment of a full-length cDNA or gene sequence, or the complete cDNA or gene sequence.

[0107] (b) As used herein, “comparison window” includes reference to a contiguous and specified segment of a polynucleotide/polypeptide sequence, wherein the polynucleotide/polypeptide sequence may be compared to a reference sequence and wherein the portion of the polynucleotide/polypeptide sequence in the comparison window may comprise additions or deletions (i.e., gaps) compared to the reference sequence (which does not comprise additions or deletions) for optimal alignment of the two sequences. Generally, the comparison window is at least 20 contiguous nucleotides/amino acids residues in length, and optionally can be 30, 40, 50, 100, or longer. Those of skill in the art understand that to avoid a high similarity to a reference sequence due to inclusion of gaps in the polynucleotide/polypeptide sequence, a gap penalty is typically introduced and is subtracted from the number of matches.

[0108] Methods of alignment of sequences for comparison are well-known in the art. Optimal alignment of sequences for comparison may be conducted by the local homology algorithm of Smith and Waterman, Adv. Appl. Math. 2:482 (1981); by the homology alignment algorithm of Needleman and Wunsch, J. Mol. Biol. 48:443 (1970); by the search for similarity method of Pearson and Lipman, Proc. Natl. Acad. Sci. 85:2444 (1988); by computerized implementations of these algorithms, including, but not limited to: CLUSTAL in the PC/Gene program by Intelligenetics, Mountain View, Calif.; GAP, BESTFIT, BLAST, FASTA, and TFASTA in the Wisconsin Genetics Software Package, Genetics Computer Group (GCG), 575 Science Dr., Madison, Wis., USA; the CLUSTAL program is well described by Higgins and Sharp, Gene 73:237-244 (1988); Higgins and Sharp, CABIOS 5:151-153 (1989); Corpet et al., Nucleic Acids Research 16:10881-90 (1988); Huang et al., Computer Applications in the Biosciences 8:155-65 (1992), and Pearson et al., Methods in Molecular Biology 24:307-331 (1994).

[0109] The BLAST family of programs which can be used for database similarity searches includes: BLASN for nucleotide query sequences against nucleotide database sequences; BLASTX for nucleotide query sequences against protein database sequences; BLASTP for protein query sequences against protein database sequences; TBLASTN for protein query sequences against nucleotide database sequences; and TBLASTX for nucleotide query sequences against nucleotide database sequences. See Current Protocols in Molecular Biology, Chapter 19, Ausubel et al., Eds., Greene Publishing and Wiley-Interscience, New York (1995); Altschul et al., J. Mol. Biol., 215:403-410 (1990); and, Altschul et al., Nucleic Acids Res. 25:3389-3402 (1997).

[0110] Software for performing BLAST analyses is publicly available, e.g., through the National Center for Biotechnology Information (http://www.ncbi.nlm.nih.gov/). This algorithm involves first identifying high scoring sequence pairs (HSPs) by identifying short words of length W in the query sequence, which either match or satisfy some positive-valued threshold score T when aligned with a word of the same length in a database sequence. T is referred to as the neighborhood word score threshold. These initial neighborhood word hits act as seeds for initiating searches to find longer HSPs containing them. The word hits are then extended in both directions along each sequence for as far as the cumulative alignment score can be increased. Cumulative scores are calculated using, for nucleotide sequences, the parameters M (reward score for a pair of matching residues; always >0) and N (penalty score for mismatching residues; always <0). For amino acid sequences, a scoring matrix is used to calculate the cumulative score. Extension of the word hits in each direction are halted when: the cumulative alignment score falls off by the quantity X from its maximum achieved value; the cumulative score goes to zero or below, due to the accumulation of one or more negative-scoring residue alignments; or the end of either sequence is reached. The BLAST algorithm parameters W, T, and X determine the sensitivity and speed of the alignment. The BLASTN program (for nucleotide sequences) uses as defaults a wordlength (W) of 11, an expectation (E) of 10, a cutoff of 100, M=5, N=−4, and a comparison of both strands. For amino acid sequences, the BLASTP program uses as defaults a wordlength (W) of 3, an expectation (E) of 10, and the BLOSUM62 scoring matrix (see Henikoff & Henikoff (1989) Proc. Natl. Acad. Sci. USA 89:10915).

[0111] In addition to calculating percent sequence identity, the BLAST algorithm also performs a statistical analysis of the similarity between two sequences (see e.g., Karlin & Altschul, Proc. Nat'l. Acad. Sci. USA 90:5873-5877 (1993)). One measure of similarity provided by the BLAST algorithm is the smallest sum probability (P(N)), which provides an indication of the probability by which a match between two nucleotide or amino acid sequences would occur by chance.

[0112] BLAST searches assume that proteins can be modeled as random sequences. However, many real proteins comprise regions of nonrandom sequences which may be homopolymeric tracts, short-period repeats, or regions enriched in one or more amino acids. Such low-complexity regions may be aligned between unrelated proteins even though other regions of the protein are entirely dissimilar. A number of low-complexity filter programs can be employed to reduce such low-complexity alignments. For example, the SEG (Wooten and Federhen, Comput. Chem., 17:149-163 (1993)) and XNU (Claverie and States, Comput. Chem., 17:191-201 (1993)) low-complexity filters can be employed alone or in combination.

[0113] Unless otherwise stated, nucleotide and protein identity/similarity values provided herein are calculated using GAP (GCG Version 10) under default values.

[0114] GAP (Global Alignment Program) can also be used to compare a polynucleotide or polypeptide of the present invention with a reference sequence. GAP uses the algorithm of Needleman and Wunsch (J. Mol. Biol. 48:443-453, 1970) to find the alignment of two complete sequences that maximizes the number of matches and minimizes the number of gaps. GAP considers all possible alignments and gap positions and creates the alignment with the largest number of matched bases and the fewest gaps. It allows for the provision of a gap creation penalty and a gap extension penalty in units of matched bases. GAP must make a profit of gap creation penalty number of matches for each gap it inserts. If a gap extension penalty greater than zero is chosen, GAP must, in addition, make a profit for each gap inserted of the length of the gap times the gap extension penalty. Default gap creation penalty values and gap extension penalty values in Version 10 of the Wisconsin Genetics Software Package for protein sequences are 8 and 2, respectively. For nucleotide sequences the default gap creation penalty is 50 while the default gap extension penalty is 3. The gap creation and gap extension penalties can be expressed as an integer selected from the group of integers consisting of from 0 to 100. Thus, for example, the gap creation and gap extension penalties can each independently be: 0, 1, 2, 3, 4, 5, 6, 7, 8, 9, 10, 15, 20, 30, 40, 50, 60 or greater.

[0115] GAP presents one member of the family of best alignments. There may be many members of this family, but no other member has a better quality. GAP displays four figures of merit for alignments: Quality, Ratio, Identity, and Similarity. The Quality is the metric maximized in order to align the sequences. Ratio is the quality divided by the number of bases in the shorter segment. Percent Identity is the percent of the symbols that actually match. Percent Similarity is the percent of the symbols that are similar. Symbols that are across from gaps are ignored. A similarity is scored when the scoring matrix value for a pair of symbols is greater than or equal to 0.50, the similarity threshold. The scoring matrix used in Version 10 of the Wisconsin Genetics Software Package is BLOSUM62 (see Henikoff & Henikoff (1989) Proc. Natl. Acad. Sci. USA 4 89:10915).

[0116] Multiple alignment of the sequences can be performed using the CLUSTAL method of alignment (Higgins and Sharp (1989) CABIOS. 5:151-153) with the default parameters (GAP PENALTY=10, GAP LENGTH PENALTY=10). Default parameters for pairwise alignments using the CLUSTAL method are KTUPLE 1, GAP PENALTY=3, WINDOW=5 and DIAGONALS SAVED=5.

[0117] (c) As used herein, “sequence identity” or “identity” in the context of two nucleic acid or polypeptide sequences includes reference to the residues in the two sequences which are the same when aligned for maximum correspondence over a specified comparison window. When percentage of sequence identity is used in reference to proteins it is recognized that residue positions which are not identical often differ by conservative amino acid substitutions, where amino acid residues are substituted for other amino acid residues with similar chemical properties (e.g., charge or hydrophobicity) and therefore do not change the functional properties of the molecule. Where sequences differ in conservative substitutions, the percent sequence identity may be adjusted upwards to correct for the conservative nature of the substitution. Sequences which differ by such conservative substitutions are said to have “sequence similarity” or “similarity”. Means for making this adjustment are well-known to those of skill in the art. Typically this involves scoring a conservative substitution as a partial rather than a full mismatch, thereby increasing the percentage sequence identity. Thus, for example, where an identical amino acid is given a score of 1 and a non-conservative substitution is given a score of zero, a conservative substitution is given a score between zero and 1. The scoring of conservative substitutions is calculated, e.g., according to the algorithm of Meyers and Miller, Computer Applic. Biol. Sci., 4:11-17 (1988) e.g., as implemented in the program PC/GENE (Intelligenetics, Mountain View, Calif., USA).

[0118] (d) As used herein, “percentage of sequence identity” means the value determined by comparing two optimally aligned sequences over a comparison window, wherein the portion of the polynucleotide sequence in the comparison window may comprise additions or deletions (i.e., gaps) as compared to the reference sequence (which does not comprise additions or deletions) for optimal alignment of the two sequences. The percentage is calculated by determining the number of positions at which the identical nucleic acid base or amino acid residue occurs in both sequences to yield the number of matched positions, dividing the number of matched positions by the total number of positions in the window of comparison and multiplying the result by 100 to yield the percentage of sequence identity.

[0119] Utilities

[0120] The present invention provides, among other things, compositions and methods for modulating (i.e., increasing or decreasing) the level of polynucleotides and polypeptides of the present invention in plants. In particular, the polynucleotides and polypeptides of the present invention can be expressed temporally or spatially, e.g., at developmental stages, in tissues, and/or in quantities, which are uncharacteristic of non-recombinantly engineered plants.

[0121] The present invention also provides isolated nucleic acids comprising polynucleotides of sufficient length and complementarity to a polynucleotide of the present invention to use as probes or amplification primers in the detection, quantitation, or isolation of gene transcripts. For example, isolated nucleic acids of the present invention can be used as probes in detecting deficiencies in the level of mRNA in screenings for desired transgenic plants, for detecting mutations in the gene (e.g., substitutions, deletions, or additions), for monitoring upregulation of expression or changes in enzyme activity in screening assays of compounds, for detection of any number of allelic variants (polymorphisms), orthologs, or paralogs of the gene, or for site directed mutagenesis in eukaryotic cells (see, e.g., U.S. Pat. No. 5,565,350). The isolated nucleic acids of the present invention can also be used for recombinant expression of their encoded polypeptides, or for use as immunogens in the preparation and/or screening of antibodies. The isolated nucleic acids of the present invention can also be employed for use in sense or antisense suppression of one or more genes of the present invention in a host cell, tissue, or plant. Attachment of chemical agents which bind, intercalate, cleave and/or crosslink to the isolated nucleic acids of the present invention can also be used to modulate transcription or translation.

[0122] The present invention also provides isolated proteins comprising a polypeptide of the present invention (e.g., preproenzyme, proenzyme, or enzymes). The present invention also provides proteins comprising at least one epitope from a polypeptide of the present invention. The proteins of the present invention can be employed in assays for enzyme agonists or antagonists of enzyme function, or for use as immunogens or antigens to obtain antibodies specifically immunoreactive with a protein of the present invention. Such antibodies can be used in assays for expression levels, for identifying and/or isolating nucleic acids of the present invention from expression libraries, for identification of homologous polypeptides from other species, or for purification of polypeptides of the present invention.

[0123] The isolated nucleic acids and polypeptides of the present invention can be used over a broad range of plant types, particularly monocots such as the species of the family Gramineae including Hordeum, Secale, Oryza, Triticum, Sorghum (e.g., S. bicolor) and Zea (e.g., Z. mays), and dicots such as Glycine.

[0124] The isolated nucleic acid and proteins of the present invention can also be used in species from the genera: Cucurbita, Rosa, Vitis, Juglans, Fragaria, Lotus, Medicago, Onobrychis, Trifolium, Trigonella, Vigna, Citrus, Linum, Geranium, Manihot, Daucus, Arabidopsis, Brassica, Raphanus, Sinapis, Atropa, Capsicum, Datura, Hyoscyam us, Lycopersicon, Nicotiana, Solanum, Petunia, Digitalis, Majorana, Ciahorium, Helianthus, Lactuca, Bromus, Asparagus, Antirrhinum, Hleterocallis, Nemesis, Pelargonium, Panieum, Pennisetum, Ranunculus, Senecio, Salpiglossis, Cucumis, Browallia, Pisum, Phaseolus, Lolium, and Avena.

[0125] Nucleic Acids

[0126] The present invention provides, among other things, isolated nucleic acids of RNA, DNA, and analogs and/or chimeras thereof, comprising a polynucleotide of the present invention.

[0127] A polynucleotide of the present invention is inclusive of those in Table 1 arid:

[0128] (a) an isolated polynucleotide encoding a polypeptide of the present invention such as those referenced in Table 1, including exemplary polynucleotides of the present invention;

[0129] (b) an isolated polynucleotide which is the product of amplification from a plant nucleic acid library using primer pairs which selectively hybridize under stringent conditions to loci within a polynucleotide of the present invention;

[0130] (c) an isolated polynucleotide which selectively hybridizes to a polynucleotide of (a) or (b);

[0131] (d) an isolated polynucleotide having a specified sequence identity with polynucleotides of (a), (b), or (c);

[0132] (e) an isolated polynucleotide encoding a protein having a specified number of contiguous amino acids from a prototype polypeptide, wherein the protein is specifically recognized by antisera elicited by presentation of the protein and wherein the protein does not detectably immunoreact to antisera which has been fully immunosorbed with the protein;

[0133] (f) complementary sequences of polynucleotides of (a), (b), (c), (d), or (e); and

[0134] (g) an isolated polynucleotide comprising at least a specific number of contiguous nucleotides from a polynucleotide of (a), (b), (c), (d), (e), or (f);

[0135] (h) an isolated polynucleotide from a full-length enriched cDNA library having the physico-chemical property of selectively hybridizing to a polynucleotide of (a), (b), (c), (d), (e), (f), or (g);

[0136] (i) an isolated polynucleotide made by the process of: 1) providing a full-length enriched nucleic acid library, 2) selectively hybridizing the polynucleotide to a polynucleotide of (a), (b), (c), (d), (e), (t), (g), or (h), thereby isolating the polynucleotide from the nucleic acid library.

[0137] A. Polynucleotides Encoding A Polypeptide of the Present Invention

[0138] As indicated in (a), above, the present invention provides isolated nucleic acids comprising a polynucleotide of the present invention, wherein the polynucleotide encodes a polypeptide of the present invention. Every nucleic acid sequence herein that encodes a polypeptide also, by reference to the genetic code, describes every possible silent variation of the nucleic acid. One of ordinary skill will recognize that each codon in a nucleic acid (except AUG, which is ordinarily the only codon for methionine; and UGG, which is ordinarily the only codon for tryptophan) can be modified to yield a functionally identical molecule. Thus, each silent variation of a nucleic acid which encodes a polypeptide of the present invention is implicit in each described polypeptide sequence and is within the scope of the present invention. Accordingly, the present invention includes polynucleotides of the present invention and polynucleotides encoding a polypeptide of the present invention.

[0139] B. Polynucleotides Amplified from a Plant Nucleic Acid Library

[0140] As indicated in (b), above, the present invention provides an isolated nucleic acid comprising a polynucleotide of the present invention, wherein the polynucleotides are amplified, under nucleic acid amplification conditions, from a plant nucleic acid library. Nucleic acid amplification conditions for each of the variety of amplification methods are well known to those of ordinary skill in the art. The plant nucleic acid library can be constructed from a monocot such as a cereal crop. Exemplary cereals include corn, sorghum, alfalfa, canola, wheat, or rice. The plant nucleic acid library can also be constructed from a dicot such as soybean. Zea mays lines B73, PHRE1, A632, BMS-P2#10, W23, and Mo17 are known and publicly available. Other publicly known and available maize lines can be obtained from the Maize Genetics Cooperation (Urbana, Ill.). Wheat lines are available from the Wheat Genetics Resource Center (Manhattan, Kans.).

[0141] The nucleic acid library may be a EDNA library, a genomic library, or a library generally constructed from nuclear transcripts at any stage of intron processing. cDNA libraries can be normalized to increase the representation of relatively rare cDNAs. In optional embodiments, the cDNA library is constructed using an enriched fill-length cDNA synthesis method. Examples of such methods include Oligo-Capping (Maruyama, K. and Sugano, S. Gene 138:171 174, 1994), Biotinylated CAP Trapper (Caminci, et al. Genomics 37:327-336, 1996), and CAP Retention Procedure (Edery, E., Chu, L. L. et al., Molecular and Cellular Biology 15:3363-3371, 1995). Rapidly growing tissues or rapidly dividing cells are preferred for use as an mRNA source for construction of a cDNA library. Growth stages of corn is described in “How a Corn Plant Develops,” Special Report No. 48, Iowa State University of Science and Technology Cooperative Extension Service, Ames, Iowa., Reprinted February 1993.

[0142] A polynucleotide of this embodiment (or subsequences thereof) can be obtained, for example, by using amplification primers which are selectively hybridized and primer extended, under nucleic acid amplification conditions, to at least two sites within a polynucleotide of the present invention, or to two sites within the nucleic acid which flank and comprise a polynucleotide of the present invention, or to a site within a polynucleotide of the present invention and a site within the nucleic acid which comprises it. Methods for obtaining 5′ and/or 3′ ends of a vector insert are well known in the art. See e.g., RACE (Rapid Amplification of Complementary Ends) as described in Frohman, M. A., in PCR Protocols: A Guide to Methods and Applications, M. A. Innis, D. H. Gelfand, J. J. Sninsky, T. J. White, Eds. (Academic Press, Inc., San Diego), pp. 28-38 (1990)); see also, U.S. Pat. No. 5,470,722, and Current Protocols in Molecular Biology, Unit 15.6, Ausubel et al., Eds., Greene Publishing and Wiley-Interscience, New York (1995); Frohman and Martin, Techniques 1:165 (1989).

[0143] Optionally, the primers are complementary to a subsequence of the target nucleic acid which they amplify but may have a sequence identity ranging from about 85% to 99% relative to the polynucleotide sequence which they are designed to anneal to. As those skilled in the art will appreciate, the sites to which the primer pairs will selectively hybridize are chosen such that a single contiguous nucleic acid can be formed under the desired nucleic acid amplification conditions. The primer length in nucleotides is selected from the group of integers consisting of from at least 15 to 50. Thus, the primers can be at least 15, 18, 20, 25, 30, 40, or 50 nucleotides in length. Those of skill will recognize that a lengthened primer sequence can be employed to increase specificity of binding (i.e., annealing) to a target sequence. A non-annealing sequence at the 5′ end of a primer (a “tail”) can be added, for example, to introduce a cloning site at the terminal ends of the amplicon.

[0144] The amplification products can be translated using expression systems well known to those of skill in the art. The resulting translation products can be confirmed as polypeptides of the present invention by, for example, assaying for the appropriate catalytic activity (e.g., specific activity and/or substrate specificity), or verifying the presence of one or more epitopes which are specific to a polypeptide of the present invention. Methods for protein synthesis from PCR derived templates are known in the art and available commercially. See e.g., Amersham Life Sciences, Inc., Catalog 97, p. 354.

[0145] C. Polynucleotides Which Selectively Hybridize to a Polynucleotide of (A) or (B)

[0146] As indicated in (c), above, the present invention provides isolated nucleic acids comprising polynucleotides of the present invention, wherein the polynucleotides selectively hybridize, under selective hybridization conditions, to a polynucleotide of sections (A) or (B) as discussed above. Thus, the polynucleotides of this embodiment can be used for isolating, detecting, and/or quantifying nucleic acids comprising the polynucleotides of (A) or (B). For example, polynucleotides of the present invention can be used to identify, isolate, or amplify partial or full-length clones in a deposited library. In some embodiments, the polynucleotides are genomic or cDNA sequences isolated or otherwise complementary to a cDNA from a dico or monocot nucleic acid library. Exemplary species of monocots and dicots include, but are not limited to: maize, canola, soybean, cotton, wheat, sorghum, sunflower, alfalfa, oats, sugar cane, millet, barley, and rice. The cDNA library comprises at least 50% to 95% full-length sequences (for example, at least 50%, 60%, 70%, 80%, 90%, or 95% full-length sequences). The cDNA libraries can be normalized to increase the representation of rare sequences. See e.g., U.S. Pat. No. 5,482,845. Low stringency hybridization conditions are typically, but not exclusively, employed with sequences having a reduced sequence identity relative to complementary sequences. Moderate and high stringency conditions can optionally be employed for sequences of greater identity. Low stringency conditions allow selective hybridization of sequences having about 70% to 80% sequence identity and can be employed to identify orthologous or paralogous sequences.

[0147] D. Polynucleotides Having a Specific Sequence Identity with the Polynucleotides of (A), (B) or (C)

[0148] As indicated in (d), above, the present invention provides isolated nucleic acids comprising polynucleotides of the present invention, wherein the polynucleotides have a specified identity at the nucleotide level to a polynucleotide as disclosed above in sections (A), (B), or (C), above. Identity can be calculated using, for example, the BLAST, CLUSTALW, or GAP algorithms under default conditions. The percentage of identity to a reference sequence is at least 60% and, rounded upwards to the nearest integer, can be expressed as an integer selected from the group of integers consisting of from 60 to 99. Thus, for example, the percentage of identity to a reference sequence can be at least 70%, 75%, 80%, 85%, 90%, or 95%.

[0149] Optionally, the polynucleotides of this embodiment will encode a polypeptide that will share an epitope with a polypeptide encoded by the polynucleotides of sections (A), (B), or (C). Thus, these polynucleotides encode a first polypeptide which elicits production of antisera comprising antibodies which are specifically reactive to a second polypeptide encoded by a polynucleotide of (A), (B), or (C). However, the first polypeptide does not bind to antisera raised against itself when the antisera has been fully immunosorbed with the first polypeptide. Hence, the polynucleotides of this embodiment can be used to generate antibodies for use in, for example, the screening of expression libraries for nucleic acids comprising polynucleotides of (A), (B), or (C), or for purification of, or in immunoassays for, polypeptides encoded by the polynucleotides of (A), (B), or (C). The polynucleotides of this embodiment comprise nucleic acid sequences which can be employed for selective hybridization to a polynucleotide encoding a polypeptide of the present invention.

[0150] Screening polypeptides for specific binding to antisera can be conveniently achieved using peptide display libraries. This method involves the screening of large collections of peptides for individual members having the desired function or structure. Antibody screening of peptide display libraries is well known in the art. The displayed peptide sequences can be from 3 to 5000 or more amino acids in length, frequently from 5-100 amino acids long, and often from about 8 to 15 amino acids long. In addition to direct chemical synthetic methods for generating peptide libraries, several recombinant DNA methods have been described. One type involves the display of a peptide sequence on the surface of a bacteriophage or cell. Each bacteriophage or cell contains the nucleotide sequence encoding the particular displayed peptide sequence. Such methods are described in PCT patent publication Nos. 91/17271, 91/18980, 91/19818, and 93/08278. Other systems for generating libraries of peptides have aspects of both in vitro chemical synthesis and recombinant methods. See, PCT Patent publication Nos. 92/05258, 92/14843, and 97/20078. See also, U.S. Pat. Nos. 5,658,754; and 5,643,768. Peptide display libraries, vectors, and screening kits are commercially available from such suppliers as Invitrogen (Carlsbad, Calif.).

[0151] E. Polynucleotides Encoding a Protein Having a Subsequence from a Prototype Polypeptide and Cross-Reactive to the Prototype Polypeptide

[0152] As indicated in (e), above, the present invention provides isolated nucleic acids comprising polynucleotides of the present invention, wherein the polynucleotides encode a protein having a subsequence of contiguous amino acids from a prototype polypeptide of the present invention such as are provided in (a), above. The length of contiguous amino acids from the prototype polypeptide is selected from the group of integers consisting of from at least 10 to the number of amino acids within the prototype sequence. Thus, for example, the polynucleotide can encode a polypeptide having a subsequence having at least 10, 15, 20, 25, 30, 35, 40, 45, or 50 contiguous amino acids from the prototype polypeptide. Further, the number of such subsequences encoded by a polynucleotide of the instant embodiment can be any integer selected from the group consisting of from 1 to 20, such as 2, 3, 4, or 5. The subsequences can be separated by any integer of nucleotides from 1 to the number of nucleotides in the sequence such as at least 5, 10, 15, 25, 50, 100, or 200 nucleotides.

[0153] The proteins encoded by polynucleotides of this embodiment, when presented as an immunogen, elicit the production of polyclonal antibodies which specifically bind to a prototype polypeptide such as but not limited to, a polypeptide encoded by the polynucleotide of (a) or (b), above. Generally, however, a protein encoded by a polynucleotide of this embodiment does not bind to antisera raised against the prototype polypeptide when the antisera has been filly immunosorbed with the prototype polypeptide. Methods of making and assaying for antibody binding specificity/affinity are well known in the art. Exemplary immunoassay formats include ELISA, competitive immunoassays, radioimmunoassays, Western blots, indirect immunofluorescent assays and the like.

[0154] In a preferred assay method, fully immunosorbed and pooled antisera which is elicited to the prototype polypeptide can be used in a competitive binding assay to test the protein. The concentration of the prototype polypeptide required to inhibit 50% of the binding of the antisera to the prototype polypeptide is determined. If the amount of the protein required to inhibit binding is less than twice the amount of the prototype protein, then the protein is said to specifically bind to the antisera elicited to the immunogen. Accordingly, the proteins of the present invention embrace allelic variants, conservatively modified variants, and minor recombinant modifications to a prototype polypeptide.

[0155] A polynucleotide of the present invention optionally encodes a protein having a molecular weight as the non-glycosylated protein within 20% of the molecular weight of the full-length non-glycosylated polypeptides of the present invention. Molecular weight can be readily determined by SDS-PAGE under reducing conditions. Optionally, the molecular weight is within 15% of a full length polypeptide of the present invention, more preferably within 10% or 5%, and most preferably within 3%, 2%, or 1% of a full length polypeptide of the present invention.

[0156] Optionally, the polynucleotides of this embodiment will encode a protein having a specific enzymatic activity at least 50%, 60%, 80%, or 90% of a cellular extract comprising the native, endogenous full-length polypeptide of the present invention. Further, the proteins encoded by polynucleotides of this embodiment will optionally have a substantially similar affinity constant (Kₘ) and/or catalytic activity (i.e., the microscopic rate constant, k_{cat}) as the native endogenous, full-length protein. Those of skill in the art will recognize that k_{cat}/Kₘ value determines the specificity for competing substrates and is often referred to as the specificity constant. Proteins of this embodiment can have a k_{cat}/Kₘ value at least 10% of a full-length polypeptide of the present invention as determined using the endogenous substrate of that polypeptide. Optionally, the k_{cat}/Kₘ value will be at least 20%, 30%, 40%, 50%, and most preferably at least 60%, 70%, 80%, 90%, or 95% the k_{cat}/Kₘ value of the full-length polypeptide of the present invention. Determination of k_{cat}, Kₘ, and k_{cat}/Kₘ can be determined by any number of means well known to those of skill in the art. For example, the initial rates (i.e., the first 5% or less of the reaction) can be determined using rapid mixing and sampling techniques (e.g., continuous-flow, stopped-flow, or rapid quenching techniques), flash photolysis, or relaxation methods (e.g., temperature jumps) in conjunction with such exemplary methods of measuring as spectrophotometry, spectrofluorimetry, nuclear magnetic resonance, or radioactive procedures. Kinetic values are conveniently obtained using a Lineweaver-Burk or Eadie-Hofstee plot.

[0157] F. Polynucleotides Complementary to the Polynucleotides of (A)-(E)

[0158] As indicated in (f), above, the present invention provides isolated nucleic acids comprising polynucleotides complementary to the polynucleotides of paragraphs A-E, above. As those of skill in the art will recognize, complementary sequences base-pair throughout the entirety of their length with the polynucleotides of sections (A)-(E) (i.e., have 100% sequence identity over their entire length). Complementary bases associate through hydrogen bonding in double stranded nucleic acids. For example, the following base pairs are complementary: guanine and cytosine; adenine and thymine; and adenine and uracil.

[0159] G. Polynucleotides Which are Subsequences of the Polynucleotides of (A)-(F)

[0160] As indicated in (g), above, the present invention provides isolated nucleic acids comprising polynucleotides which comprise at least 15 contiguous bases from the polynucleotides of sections (A) through (F) as discussed above. The length of the polynucleotide is given as an integer selected from the group consisting of from at least 15 to the length of the nucleic acid sequence from which the polynucleotide is a subsequence of. Thus, for example, polynucleotides of the present invention are inclusive of polynucleotides comprising at least 15, 20, 25, 30, 40, 50, 60, 75, or 100 contiguous nucleotides in length from the polynucleotides of (A)-(F). Optionally, the number of such subsequences encoded by a polynucleotide of the instant embodiment can be any integer selected from the group consisting of from 1 to 20, such as 2, 3, 4, or 5. The subsequences can be separated by any integer of nucleotides from I to the number of nucleotides in the sequence such as at least 5, 10, 15, 25, 50, 1 00, or 200 nucleotides.

[0161] Subsequences can be made by in vitro synthetic, in vitro biosynthetic, or in vivo recombinant methods. In optional embodiments, subsequences can be made by nucleic acid amplification. For example, nucleic acid primers will be constructed to selectively hybridize to a sequence (or its complement) within, or co-extensive with, the coding region.

[0162] The subsequences of the present invention can comprise structural characteristics of the sequence from which it is derived. Alternatively, the subsequences can lack certain structural characteristics of the larger sequence from which it is derived such as a poly (A) tail. Optionally, a subsequence from a polynucleotide encoding a polypeptide having at least one epitope in common with a prototype polypeptide sequence as provided in (a), above, may encode an epitope in common with the prototype sequence. Alternatively, the subsequence may not encode an epitope in common with the prototype sequence but can be used to isolate the larger sequence by, for example, nucleic acid hybridization with the sequence from which it is derived. Subsequences can be used to modulate or detect gene expression by introducing into the subsequences compounds which bind, intercalate, cleave and/or crosslink to nucleic acids. Exemplary compounds include acridine, psoralen, phenanthroline, naphthoquinone, daunomycin or chloroethylaminoaryl conjugates.

[0163] H. Polynucleotides From a Full-length Enriched cDNA Library Having the Physico-Chemical Property of Selectively Hybridizing to a Polynucleotide of (A)-(G)

[0164] As indicated in (h), above, the present invention provides an isolated polynucleotide from a full-length enriched cDNA library having the physico-chemical property of selectively hybridizing to a polynucleotide of paragraphs (A), (B), (C), (D), (E), (F), or (G) as discussed above. Methods of constructing full-length enriched cDNA libraries are known in the art and discussed briefly below. The cDNA library comprises at least 50% to 95% full-length sequences (for example, at least 50%, 60%, 70%, 80%, 90%, or 95% full-length sequences). The cDNA library can be constructed from a variety of tissues from a monocot or dicot at a variety of developmental stages. Exemplary species include maize, wheat, rice, canola, soybean, cotton, sorghum, sunflower, alfalfa, oats, sugar cane, millet, barley, and rice. Methods of selectively hybridizing, under selective hybridization conditions, a polynucleotide from a full-length enriched library to a polynucleotide of the present invention are known to those of ordinary skill in the art. Any number of stringency conditions can be employed to allow for selective hybridization. In optional embodiments, the stringency allows for selective hybridization of sequences having at least 70%, 75%, 80%, 85%, 90%, 95%, or 98% sequence identity over the length of the hybridized region. Full-length enriched cDNA libraries can be normalized to increase the representation of rare sequences.

[0165] I. Polynucleotide Products Made by a cDNA Isolation Process

[0166] As indicated in (I), above, the present invention provides an isolated polynucleotide made by the process of: 1) providing a full-length enriched nucleic acid library, 2) selectively hybridizing the polynucleotide to a polynucleotide of paragraphs (A), (B), (C), (D), (E), (F), (G), or (H) as discussed above, and thereby isolating the polynucleotide from the nucleic acid library. Full-length enriched nucleic acid libraries are constructed as discussed in paragraph (G) and below. Selective hybridization conditions are as discussed in paragraph (G). Nucleic acid purification procedures are well known in the art. Purification can be conveniently accomplished using solid-phase methods; such methods are well known to those of skill in the art and kits are available from commercial suppliers such as Advanced Biotechnologies (Surrey, UK). For example, a polynucleotide of paragraphs (A)-(H) can be immobilized to a solid support such as a membrane, bead, or particle. See, e.g., U.S. Pat. No. 5,667,976. The polynucleotide product of the present process is selectively hybridized to an immobilized polynucleotide and the solid support is subsequently isolated from non-hybridized polynucleotides by methods including, but not limited to, centrifugation, magnetic separation, filtration, electrophoresis, and the like.

[0167] Construction of Nucleic Acids

[0168] The isolated nucleic acids of the present invention can be made using (a) standard recombinant methods, (b) synthetic techniques, or combinations thereof. In some embodiments, the polynucleotides of the present invention will be cloned, amplified, or otherwise constructed from a monocot such as corn, rice, or wheat, or a dicot such as soybean.

[0169] The nucleic acids may conveniently comprise sequences in addition to a polynucleotide of the present invention. For example, a multi-cloning site comprising one or more endonuclease restriction sites may be inserted into the nucleic acid to aid in isolation of the polynucleotide. Also, translatable sequences may be inserted to aid in the isolation of the translated polynucleotide of the present invention. For example, a hexa-histidine marker sequence provides a convenient means to purify the proteins of the present invention. A polynucleotide of the present invention can be attached to a vector, adapter, or linker for cloning and/or expression of a polynucleotide of the present invention. Additional sequences may be added to such cloning and/or expression sequences to optimize their function in cloning and/or expression, to aid in isolation of the polynucleotide, or to improve the introduction of the polynucleotide into a cell. Typically, the length of a nucleic acid of the present invention less the length of its polynucleotide of the present invention is less than 20 kilobase pairs, often less than 15 kb, and frequently less than 10 kb. Use of cloning vectors, expression vectors, adapters, and linkers is well known and extensively described in the art. For a description of various nucleic acids see, for example, Stratagene Cloning Systems, Catalogs 1999 (La Jolla, Calif.); and, Amersham Life Sciences, Inc, Catalog 99 (Arlington Heights, Ill.).

[0170] A. Recombinant Methods for Constructing Nucleic Acids

[0171] The isolated nucleic acid compositions of this invention, such as RNA, cDNA, genomic DNA, or a hybrid thereof, can be obtained from plant biological sources using any number of cloning methodologies known to those of skill in the art. In some embodiments, oligonucleotide probes which selectively hybridize, under stringent conditions, to the polynucleotides of the present invention are used to identify the desired sequence in a cDNA or genomic DNA library. Isolation of RNA, and construction of cDNA and genomic libraries is well known to those of ordinary skill in the art. See, e.g., Plant Molecular Biology: A Laboratory Manual, Clark, Ed., Springer-Verlag, Berlin (1997); and, Current Protocols in Molecular Biology, Ausubel et al., Eds., Greene Publishing and Wiley-Interscience, New York (1995).

[0172] A1. Full-length Enriched cDNA Libraries

[0173] A number of cDNA synthesis protocols have been described which provide enriched full-length cDNA libraries. Enriched full-length cDNA libraries are constructed to comprise at least 600%, and more preferably at least 70%, 80%, 90% or 95% full-length inserts amongst clones containing inserts. The length of insert in such libraries can be at least 2, 3, 4, 5, 6, 7, 8, 9, 10 or more kilobase pairs. Vectors to accommodate inserts of these sizes are known in the art and available commercially. See, e.g., Stratagene's lambda ZAP Express (cDNA cloning vector with 0 to 12 kb cloning capacity). An exemplary method of constructing a greater than 95% pure full-length cDNA library is described by Carninci et al., Genomics, 37:327-336 (1996). Other methods for producing full-length libraries are known in the art. See, e.g., Edery et al., Mol. Cell Biol., 15(6):3363-3371 (1995); and, PCT Application WO 96/34981.

[0174] A2. Normalized or Subtracted cDNA Libraries

[0175] A non-normalized cDNA library represents the mRNA population of the tissue it was made from. Since unique clones are out-numbered by clones derived from highly expressed genes their isolation can be laborious. Normalization of a cDNA library is the process of creating a library in which each clone is more equally represented. Construction of normalized libraries is described in Ko, Nucl. Acids. Res., 18(19):5705-5711 (1990); Patanjali et al., Proc. Natl. Acad. U.S.A., 88:1943-1947 (1991); U.S. Pat. No. 5,482,685, 5,482,845, and 5,637,685. In an exemplary method described by Soares et al., normalization resulted in reduction of the abundance of clones from a range of four orders of magnitude to a narrow range of only 1 order of magnitude. Proc. Natl. Acad. Sci. USA, 91:9228-9232 (1994).

[0176] Subtracted cDNA libraries are another means to increase the proportion of less abundant cDNA species. In this procedure, cDNA prepared from one pool of mRNA is depleted of sequences present in a second pool of mRNA by hybridization. The cDNA:mRNA hybrids are removed and the remaining un-hybridized cDNA pool is enriched for sequences unique to that pool. See, Foote et al. in, Plant Molecular Biology: A Laboratory Manual, Clark, Ed., Springer-Verlag, Berlin (1997); Kho and Zarbl, Technique, 3(2):58-63 (1991); Sive and St. John, Nucl. Acids Res., 16(22):10937 (1988); Current Protocols in Molecular Biology, Ausubel et al., Eds., Greene Publishing and Wiley-Interscience, New York (1995); and Swaroop et al., Nucl. Acids Res., 19)8):1954 (1991). cDNA subtraction kits are commercially available. See, e.g., PCR-Select (Clontech, Palo Alto, Calif.).

[0177] To construct genomic libraries, large segments of genomic DNA are generated by fragmentation, e.g. using restriction endonucleases, and are ligated with vector DNA to form concatemers that can be packaged into the appropriate vector. Methodologies to accomplish these ends, and sequencing methods to verify the sequence of nucleic acids are well known in the art. Examples of appropriate molecular biological techniques and instructions sufficient to direct persons of skill through many construction, cloning, and screening methodologies are found in Sambrook et al., Molecular Cloning: A Laboratory Manual, 2nd Ed., Cold Spring Harbor Laboratory Vols. 1-3 (1989), Methods in Enzymology, Vol. 152: Guide to Molecular Cloning Techniques, Berger and Kimmel, Eds., San Diego: Academic Press, Inc. (1987), Current Protocols in Molecular Biology, Ausubel et al., Eds., Greene Publishing and Wiley-Interscience, New York (1995); Plant Molecular Biology: A Laboratory Manual, Clark, Ed., Springer-Verlag, Berlin (1997). Kits for construction of genomic libraries are also commercially available.

[0178] The cDNA or genomic library can be screened using a probe based upon the sequence of a polynucleotide of the present invention such as those disclosed herein. Probes may be used to hybridize with genomic DNA or cDNA sequences to isolate homologous genes in the same or different plant species. Those of skill in the art will appreciate that various degrees of stringency of hybridization can be employed in the assay; and either the hybridization or the wash medium can be stringent.

[0179] The nucleic acids of interest can also be amplified from nucleic acid samples using amplification techniques. For instance, polymerase chain reaction (PCR) technology can be used to amplify the sequences of polynucleotides of the present invention and related genes directly from genomic DNA or cDNA libraries. PCR and other in vitro amplification methods may also be useful, for example, to clone nucleic acid sequences that code for proteins to be expressed, to make nucleic acids to use as probes for detecting the presence of the desired mRNA in samples, for nucleic acid sequencing, or for other purposes. The T4 gene 32 protein (Boehringer Mannheim) can be used to improve yield of long PCR products.

[0180] PCR-based screening methods have been described. Wilfinger et al. describe a PCR-based method in which the longest cDNA is identified in the first step so that incomplete clones can be eliminated from study. BioTechniques, 22(3):481-486 (1997). Such methods are particularly effective in combination with a full-length cDNA construction methodology, above.

[0181] B. Synthetic Methods for Constructing Nucleic Acids The isolated nucleic acids of the present invention can also be prepared by direct chemical synthesis by methods such as the phosphotriester method of Narang et al., Meth. Enzymol. 68:90-99 (1979); the phosphodiester method of Brown et al., Meth. Enzymol 68:109-151 (1979); the diethylphosphoramidite method of Beaucage et al., Tetra. Lett. 22:1859-1862 (1981); the solid phase phosphoramidite triester method described by Beaucage and Caruthers, Tetra. Letts. 22(20):1859-1862 (1981), e.g., using an automated synthesizer, e.g., as described in Needham-VanDevanter et al., Nucleic Acids Res., 12:6159-6168 (1984); and, the solid support method of U.S. Pat. No. 4,458,066. Chemical synthesis generally produces a single stranded oligonucleotide. This may be converted into double stranded DNA by hybridization with a complementary sequence, or by polymerization with a DNA polymerase using the single strand as a template. One of skill will recognize that while chemical synthesis of DNA is best employed for sequences of about 100 bases or less, longer sequences may be obtained by the ligation of shorter sequences.

[0182] Recombinant Expression Cassettes

[0183] The present invention further provides recombinant expression cassettes comprising a nucleic acid of the present invention. A nucleic acid sequence coding for the desired polypeptide of the present invention, for example a cDNA or a genomic sequence encoding a full length polypeptide of the present invention, can be used to construct a recombinant expression cassette which can be introduced into the desired host cell. A recombinant expression cassette will typically comprise a polynucleotide of the present invention operably linked to transcriptional initiation regulatory sequences which will direct the transcription of the polynucleotide in the intended host cell, such as tissues of a transformed plant.

[0184] For example, plant expression vectors may include (1) a cloned plant gene under the transcriptional control of 5′ and 3′ regulatory sequences and (2) a dominant selectable marker. Such plant expression vectors may also contain, if desired, a promoter regulatory region (e.g., one conferring inducible or constitutive, environmentally- or developmentally-regulated, or cell- or tissue-specific/selective expression), a transcription initiation start site, a ribosome binding site, an RNA processing signal, a transcription termination site, and/or a polyadenylation signal.

[0185] A plant promoter fragment can be employed which will direct expression of a polynucleotide of the present invention in all tissues of a regenerated plant. Such promoters are referred to herein as “constitutive” promoters and are active under most environmental conditions and states of development or cell differentiation. Examples of constitutive promoters include the cauliflower mosaic virus (CaMV) 35S transcription initiation region, the 1′- or 2′-promoter derived from T-DNA of Agro bacterium tumefaciens, the ubiquitin 1 promoter, the Smas promoter, the cinnamyl alcohol dehydrogenase promoter (U.S. Pat. No. 5,683,439), the Nos promoter, the pEmu promoter, the rubisco promoter, and the GRP1-8 promoter.

[0186] Alternatively, the plant promoter can direct expression of a polynucleotide of the present invention in a specific tissue or may be otherwise under more precise environmental or developmental control. Such promoters are referred to here as “inducible” promoters. Environmental conditions that may effect transcription by inducible promoters include pathogen attack, anaerobic conditions, or the presence of light. Examples of inducible promoters are the Adh1 promoter which is inducible by hypoxia or cold stress, the Hsp70 promoter which is inducible by heat stress, and the PPDK promoter which is inducible by light.

[0187] Examples of promoters under developmental control include promoters that initiate transcription only, or preferentially, in certain tissues, such as leaves, roots, fruit, seeds, or flowers. Exemplary promoters include the anther specific promoter 5126 (U.S. Pat. Nos. 5,689,049 and 5,689,051), glob-1 promoter, and gamma-zein promoter. The operation of a promoter may also vary depending on its location in the genome. Thus, an inducible promoter may become fully or partially constitutive in certain locations.

[0188] Both heterologous and non-heterologous (i.e., endogenous) promoters can be employed to direct expression of the nucleic acids of the present invention. These promoters can also be used, for example, in recombinant expression cassettes to drive expression of antisense nucleic acids to reduce, increase, or alter concentration and/or composition of the proteins of the present invention in a desired tissue. Thus, in some embodiments, the nucleic acid construct will comprise a promoter, functional in a plant cell, operably linked to a polynucleotide of the present invention. Promoters useful in these embodiments include the endogenous promoters driving expression of a polypeptide of the present invention.

[0189] In some embodiments, isolated nucleic acids which serve as promoter or enhancer elements can be introduced in the appropriate position (generally upstream) of a non-heterologous form of a polynucleotide of the present invention so as to up or down regulate expression of a polynucleotide of the present invention. For example, endogenous promoters can be altered in vivo by mutation, deletion, and/or substitution (see, Kmiec, U.S. Pat. No.5,565,350; Zarling et al., PCT/US93103868), or isolated promoters can be introduced into a plant cell in the proper orientation and distance from a cognate gene of a polynucleotide of the present invention so as to control the expression of the gene. Gene expression can be modulated under conditions suitable for plant growth so as to alter the total concentration and/or alter the composition of the polypeptides of the present invention in plant cell. Thus, the present invention provides compositions, and methods for making, heterologous promoters and/or enhancers operably linked to a native, endogenous (i.e., non-heterologous) form of a polynucleotide of the present invention.

[0190] If polypeptide expression is desired, it is generally desirable to include a polyadenylation region at the 3′-end of a polynucleotide coding region. The polyadenylation region can be derived from the natural gene, from a variety of other plant genes, or from T-DNA. The 3′ end sequence to be added can be derived from, for example, the nopaline synthase or octopine synthase genes, or alternatively from another plant gene, or less preferably from any other eukaryotic gene.

[0191] An intron sequence can be added to the 5′ untranslated region or the coding sequence of the partial coding sequence to increase the amount of the mature message that accumulates in the cytosol. Inclusion of a spliceable intron in the transcription unit in both plant and animal expression constructs has been shown to increase gene expression at both the mRNA and protein levels up to 1000-fold. Buchman and Berg, Mol. Cell Biol. 8:4395-4405 (1988); Callis et al., Genes Dev. 1:1183-1200 (1987). Such intron enhancement of gene expression is typically greatest when placed near the 5′ end of the transcription unit. Use of maize introns Adh1-S intron 1, 2, and 6, the Bronze-1 intron are known in the art. See generally, The Maize Handbook, Chapter 116, Freeling and Walbot, Eds., Springer, N.Y. (1994). The vector comprising the sequences from a polynucleotide of the present invention will typically comprise a marker gene which confers a selectable phenotype on plant cells. Typical vectors useful for expression of genes in higher plants are well known in the art and include vectors derived from the tumor-inducing (Ti) plasmid of Agrobacterium tumefaciens described by Rogers et al., Meth. in Enzymol., 153:253-277 (1987).

[0192] A polynucleotide of the present invention can be expressed in either sense or anti-sense orientation as desired. It will be appreciated that control of gene expression in either sense or anti-sense orientation can have a direct impact on the observable plant characteristics. Antisense technology can be conveniently used to inhibit gene expression in plants. To accomplish this, a nucleic acid segment from the desired gene is cloned and operably linked to a promoter such that the anti-sense strand of RNA will be transcribed. The construct is then transformed into plants and the antisense strand of RNA is produced. In plant cells, it has been shown that antisense RNA inhibits gene expression by preventing the accumulation of mRNA which encodes the enzyme of interest, see, e.g., Sheehy et al., Proc. Nat'l. Acad. Sci. (USA) 85:8805-8809 (1988); and Hiatt et al., U.S. Pat. No. 4,801,340.

[0193] Another method of suppression is sense suppression (i.e., co-supression). Introduction of nucleic acid configured in the sense orientation has been shown to be an effective means by which to block the transcription of target genes. For an example of the use of this method to modulate expression of endogenous genes see, Napoli et al., The Plant Cell 2:279-289 (1990) and U.S. Pat. No. 5,034,323.

[0194] Catalytic RNA molecules or ribozymes can also be used to inhibit expression of plant genes. It is possible to design ribozymes that specifically pair with virtually any target RNA and cleave the phosphodiester backbone at a specific location, thereby functionally inactivating the target RNA. In carrying out this cleavage, the ribozyme is not itself altered, and is thus capable of recycling and cleaving other molecules, making it a true enzyme. The inclusion of ribozyme sequences within antisense RNAs confers RNA-cleaving activity upon them, thereby increasing the activity of the constructs. The design and use of target RNA-specific ribozymes is described in Haseloff et al., Nature 334:585-591 (1988).

[0195] A variety of cross-linking agents, alkylating agents and radical generating species as pendant groups on polynucleotides of the present invention can be used to bind, label, detect, and/or cleave nucleic acids. For example, Vlassov, V. V., et al., Nucleic Acids Res (1986) 14:4065-4076, describe covalent bonding of a single-stranded DNA fragment with alkylating derivatives of nucleotides complementary to target sequences. A report of similar work by the same group is that by Knorre, D. G. et al., Biochimie (1985) 67:785-789. Iverson and Dervan also showed sequence-specific cleavage of single-stranded DNA mediated by incorporation of a modified nucleotide which was capable of activating cleavage (J Am Chem Soc (1987) 109:1241-1243). Meyer, R. B. et al., J Am Chem Soc (1989) 111:8517-8519, effect covalent crosslinking to a target nucleotide using an alkylating agent complementary to the single-stranded target nucleotide sequence. A photoactivated crosslinking to single-stranded oligonucleotides mediated by psoralen was disclosed by Lee, B. L. et al., Biochemistry (1988) 27:3197-3203. Use of crosslinking in triple-helix forming probes was also disclosed by Home et al., J Am Chem Soc (1990) 112:2435-2437. Use of N4, N4-ethanocytosine as an alkylating agent to crosslink to single-stranded oligonucleotides has also been described by Webb and Matteucci, J Am Chem Soc (1986) 108:2764-2765; Nucleic Acids Res (1986) 14:7661-7674; Feteritz et al., J Am. Chem. Soc. 113:4000 (1991). Various compounds to bind, detect, label, and/or cleave nucleic acids are known in the art. See, for example, U.S. Pat. Nos. 5,543,507; 5,672,593; 5,484,908; 5,256,648; and, 5,681941.

[0196] Proteins

[0197] The isolated proteins of the present invention comprise a polypeptide having at least 10 amino acids from a polypeptide of the present invention (or conservative variants thereof) such as those encoded by any one of the polynucleotides of the present invention as discussed more fully above (e.g., Table 1). The proteins of the present invention or variants thereof can comprise any number of contiguous amino acid residues from a polypeptide of the present invention, wherein that number is selected from the group of integers consisting of from 10 to the number of residues in a full-length polypeptide of the present invention. Optionally, this subsequence of contiguous amino acids is at least 15, 20, 25, 30, 35, or 40 amino acids in length, often at least 50, 60, 70, 80, or 90 amino acids in length. Further, the number of such subsequences can be any integer selected from the group consisting of from 1 to 20, such as 2, 3, 4, or 5.

[0198] The present invention further provides a protein comprising a polypeptide having a specified sequence identity/similarity with a polypeptide of the present invention. The percentage of sequence identity/similarity is an integer selected from the group consisting of from 50 to 99. Exemplary sequence identity/similarity values include 60%, 65%, 70%, 75%, 80%, 85%, 90%, and 95%. Sequence identity can be determined using, for example, the GAP, CLUSTALW, or BLAST algorithms.

[0199] As those of skill will appreciate, the present invention includes, but is not limited to, catalytically active polypeptides of the present invention (i.e., enzymes). Catalytically active polypeptides have a specific activity of at least 20%, 30%, or 40%, and preferably at least 50%, 60%, or 70%, and most preferably at least 80%, 90%, or 95% that of the native (non-synthetic), endogenous polypeptide. Further, the substrate specificity (k_{cat}/Kₘ) is optionally substantially similar to the native (non-synthetic), endogenous polypeptide. Typically, the Kₘ will be at least 30%, 40%, or 50%, that of the native (non-synthetic), endogenous polypeptide; and more preferably at least 60%, 70%, 80%, or 90%. Methods of assaying and quantifying measures of enzymatic activity and substrate specificity (k_{cat}/Kₘ), are well known to those of skill in the art.

[0200] Generally, the proteins of the present invention will, when presented as an immunogen, elicit production of an antibody specifically reactive to a polypeptide of the present invention. Further, the proteins of the present invention will not bind to antisera raised against a polypeptide of the present invention which has been fully immunosorbed with the same polypeptide. Immunoassays for determining binding are well known to those of skill in the art. A preferred immunoassay is a competitive immunoassay. Thus, the proteins of the present invention can be employed as immunogens for constructing antibodies immunoreactive to a protein of the present invention for such exemplary utilities as immunoassays or protein purification techniques.

[0201] Expression of Proteins in Host Cells

[0202] Using the nucleic acids of the present invention, one may express a protein of the present invention in a recombinantly engineered cell such as bacteria, yeast, insect, mammalian, or preferably plant cells. The cells produce the protein in a non-natural condition (e.g., in quantity, composition, location, and/or time), because they have been genetically altered through human intervention to do so.

[0203] It is expected that those of skill in the art are knowledgeable in the numerous expression systems available for expression of a nucleic acid encoding a protein of the present invention. No attempt to describe in detail the various methods known for the expression of proteins in prokaryotes or eukaryotes will be made.

[0204] In brief summary, the expression of isolated nucleic acids encoding a protein of the present invention will typically be achieved by operably linking, for example, the DNA or cDNA to a promoter (which is either constitutive or regulatable), followed by incorporation into an expression vector. The vectors can be suitable for replication and integration in either prokaryotes or eukaryotes. Typical expression vectors contain transcription and translation terminators, initiation sequences, and promoters useful for regulation of the expression of the DNA encoding a protein of the present invention. To obtain high level expression of a cloned gene, it is desirable to construct expression vectors which contain, at the minimum, a strong promoter to direct transcription, a ribosome binding site for translational initiation, and a transcription/translation terminator. One of skill would recognize that modifications can be made to a protein of the present invention without diminishing its biological activity. Some modifications may be made to facilitate the cloning, expression, or incorporation of the targeting molecule into a fusion protein. Such modifications are well known to those of skill in the art and include, for example, a methionine added at the amino terminus to provide an initiation site, or additional amino acids (e.g., poly His) placed on either terminus to create conveniently located purification sequences. Restriction sites or termination codons can also be introduced.

[0205] Synthesis of Proteins

[0206] The proteins of the present invention can be constructed using non-cellular synthetic methods. Solid phase synthesis of proteins of less than about 50 amino acids in length may be accomplished by attaching the C-terminal amino acid of the sequence to an insoluble support followed by sequential addition of the remaining amino acids in the sequence. Techniques for solid phase synthesis are described by Barany and Merrifield, Solid-Phase Peptide Synthesis, pp. 3-284 in The Peptides: Analysis, Synthesis, Biology. Vol. 2: Special Methods in Peptide Synthesis, Part A.; Merrifield et al., J. Am. Chem. Soc. 85:2149-2156 (1963), and Stewart et al., Solid Phase Peptide Synthesis, 2nd ed., Pierce Chem. Co., Rockford, Ill. (1984). Proteins of greater length may be synthesized by condensation of the amino and carboxy termini of shorter fragments. Methods of forming peptide bonds by activation of a carboxy terminal end (e.g., by the use of the coupling reagent N,N′-dicycylo-hexylcarbodiimide) are known to those of skill.

[0207] Purification of Proteins

[0208] The proteins of the present invention may be purified by standard techniques well known to those of skill in the art. Recombinantly produced proteins of the present invention can be directly expressed or expressed as a fusion protein. The recombinant protein is purified by a combination of cell lysis (e.g., sonication, French press) and affinity chromatography. For fusion products, subsequent digestion of the fusion protein with an appropriate proteolytic enzyme releases the desired recombinant protein.

[0209] The proteins of this invention, recombinant or synthetic, may be purified to substantial purity by standard techniques well known in the art, including detergent solubilization, selective precipitation with such substances as ammonium sulfate, column chromatography, immunopurification methods, and others. See, for instance, R. Scopes, Protein Purification: Principles and Practice, Springer-Verlag: New York (1982); Deutscher, Guide to Protein Purification, Academic Press (1990). For example, antibodies may be raised to the proteins as described herein. Purification from E. coli can be achieved following procedures described in U.S. Pat. No. 4,511,503. The protein may then be isolated from cells expressing the protein and further purified by standard protein chemistry techniques as described herein. Detection of the expressed protein is achieved by methods known in the art and include, for example, radioimmunoassays, Western blotting techniques or immunoprecipitation.

[0210] Introduction of Nucleic Acids Into Host Cells

[0211] The method of introducing a nucleic acid of the present invention into a host cell is not critical to the instant invention. Transformation or transfection methods are conveniently used. Accordingly, a wide variety of methods have been developed to insert a DNA sequence into the genome of a host cell to obtain the transcription and/or translation of the sequence to effect phenotypic changes in the organism. Thus, any method which provides for effective introduction of a nucleic acid may be employed.

[0212] A. Plant Transformation

[0213] A nucleic acid comprising a polynucleotide of the present invention is optionally introduced into a plant. Generally, the polynucleotide will first be incorporated into a recombinant expression cassette or vector. Isolated nucleic acid acids of the present invention can be introduced into plants according to techniques known in the art. Techniques for transforming a wide variety of higher plant species are well known and described in the technical, scientific, and patent literature. See, for example, Weising et al., Ann. Rev. Genet. 22:421-477 (1988). For example, the DNA construct may be introduced directly into the genomic DNA of the plant cell using techniques such as electroporation, polyethylene glycol (PEG), poration, particle bombardment, silicon fiber delivery, or microinjection of plant cell protoplasts or embryogenic callus. See, e.g., Tomes et al., Direct DNA Transfer into Intact Plant Cells Via Microprojectile Bombardment. pp. 197-213 in Plant Cell, Tissue and Organ Culture, Fundamental Methods, eds. O. L. Gamborg and G. C. Phillips. Springer-Verlag Berlin Heidelberg N.Y., 1995; see, U.S. Pat. No. 5,990,387. The introduction of DNA constructs using PEG precipitation is described in Paszkowski et al., Embo J 3:2717-2722 (1984). Electroporation techniques are described in Fromm et al., Proc. Natl. Acad. Sci. (USA) 82:5824 (1985). Ballistic transformation techniques are described in Klein et al., Nature 327:70-73 (1987).

[0214] Agrobacterium tumefaciens-mediated transformation techniques are well described in the scientific literature. See, for example Horsch et al., Science 233:496-498 (1984); Fraley et al., Proc. Natl. Acad. Sci. (USA) 80:4803 (1983); and Plant Molecular Biology: A Laboratory Manual, Chapter 8, Clark, Ed., Springer-Verlag, Berlin (1997). The DNA constructs may be combined with suitable T-DNA flanking regions and introduced into a conventional Agrobacterium tumefaciens host vector. The virulence functions of the Agrobacterium tumefaciens host will direct the insertion of the construct and adjacent marker into the plant cell DNA when the cell is infected by the bacteria. See, U.S. Pat. No. 5,591,616. Although Agrobacterium is useful primarily in dicots, certain monocots can be transformed by Agrobacterium. For instance, Agrobacterium transformation of maize is described in U.S. Pat. No. 5,550,318.

[0215] Other methods of transfection or transformation include (1) Agrobacterium rhizogenes-mediated transformation (see, e.g., Lichtenstein and Fuller In: Genetic Engineering, vol. 6, P W J Rigby, Ed., London, Academic Press, 1987; and Lichtenstein, C. P., and Draper, J., In: DNA Cloning, Vol. II, D. M. Glover, Ed., Oxford, IRI Press, 1985), Application PCT/US87/02512 (WO 88/02405 published Apr. 7, 1988) describes the use of A. rhizogenes strain A4 and its Ri plasmid along with A. tumefaciens vectors pARC8 or pARC16 (2) liposome-mediated DNA uptake (see e.g., Freeman et al., Plant Cell Physiol. 25:1353 (1984)), (3) the vortexing method (see e.g., Kindle, Proc. Natl. Acad. Sci., (USA) 87:1228 (1990).

[0216] DNA can also be introduced into plants by direct DNA transfer into pollen as described by Zhou et al., Methods in Enzymology, 101:433 (1983); D. Hess, Intern Rev. Cytol., 107:367 (1987); Luo et al., Plant Mol. Biol Reporter, 6:165 (1988). Expression of polypeptide coding genes can be obtained by injection of the DNA into reproductive organs of a plant as described by Pena et al., Nature, 325:274 (1987). DNA can also be injected directly into the cells of immature embryos and the rehydration of desiccated embryos as described by Neuhaus et al., Theor. Appl. Genet., 75:30 (1987); and Benbrook et al., in Proceedings Bio Expo 1986, Butterworth, Stoneham, Mass., pp. 27-54 (1986). A variety of plant viruses that can be employed as vectors are known in the art and include cauliflower mosaic virus (CaMV), geminivirus, brome mosaic virus, and tobacco mosaic virus.

[0217] B. Transfection of prokaryotes, Lower Eukaryotes, and Animal Cells

[0218] Animal and lower eukaryotic (e.g., yeast) host cells are competent or rendered competent for transfection by various means. There are several well-known methods of introducing DNA into animal cells. These include: calcium phosphate precipitation, fusion of the recipient cells with bacterial protoplasts containing the DNA, treatment of the recipient cells with liposomes containing the DNA, DEAE dextran, electroporation, biolistics, and micro-injection of the DNA directly into the cells. The transfected cells are cultured by means well known in the art. Kuchler, R. J., Biochemical Methods in Cell Culture and Virology, Dowden, Hutchinson and Ross, Inc. (1977).

[0219] Transgenic Plant Regeneration

[0220] Plant cells which directly result or are derived from the nucleic acid introduction techniques can be cultured to regenerate a whole plant which possesses the introduced genotype. Such regeneration techniques often rely on manipulation of certain phytohormones in a tissue culture growth medium. Plants cells can be regenerated, e.g., from single cells, callus tissue or leaf discs according to standard plant tissue culture techniques. It is well known in the art that various cells, tissues, and organs from almost any plant can be successfully cultured to regenerate an entire plant. Plant regeneration from cultured protoplasts is described in Evans et al., Protoplasts Isolation and Culture, Handbook of plant Cell Culture, Macmillan Publishing Company, New York, pp. 124-176 (1983); and Binding, Regeneration of plants, Plant Protoplasts, CRC Press, Boca Raton, pp. 21-73 (1985).

[0221] The regeneration of plants from either single plant protoplasts or various explants is well known in the art. See, for example, Methods for Plant Molecular Biology, A. Weissbach and H. Weissbach, eds., Academic Press, Inc., San Diego, Calif. (1988). This regeneration and growth process includes the steps of selection of transformant cells and shoots, rooting the transformant shoots and growth of the plantlets in soil. For maize cell culture and regeneration see generally, The Maize Handbook, Freeling and Walbot, Eds., Springer, N.Y. (1994); Corn and Corn Improvement, 3^{rd} edition, Sprague and Dudley Eds., American Society of Agronomy, Madison, Wis. (1988). For transformation and regeneration of maize see, Gordon-Kamm et al., The Plant Cell, 2:603-618 (1990).

[0222] The regeneration of plants containing the polynucleotide of the present invention and introduced by Agrobacterium from leaf explants can be achieved as described by Horsch et al., Science, 227:1229-1231 (1985). In this procedure, transformants are grown in the presence of a selection agent and in a medium that induces the regeneration of shoots in the plant species being transformed as described by Fraley et al., Proc. Natl. Acad. Sci. (U.S.A.), 80:4803 (1983). This procedure typically produces shoots within two to four weeks and these transformant shoots are then transferred to an appropriate root-inducing medium containing the selective agent and an antibiotic to prevent bacterial growth. Transgenic plants of the present invention may be fertile or sterile.

[0223] One of skill will recognize that after the recombinant expression cassette is stably incorporated in transgenic plants and confirmed to be operable, it can be introduced into other plants by sexual crossing. Any of a number of standard breeding techniques can be used, depending upon the species to be crossed. In vegetatively propagated crops, mature transgenic plants can be propagated by the taking of cuttings or by tissue culture techniques to produce multiple identical plants. Selection of desirable transgenics is made and new varieties are obtained and propagated vegetatively for commercial use. In seed propagated crops, mature transgenic plants can be self crossed to produce a homozygous inbred plant. The inbred plant produces seed containing the newly introduced heterologous nucleic acid. These seeds can be grown to produce plants that would produce the selected phenotype. Parts obtained from the regenerated plant, such as flowers, seeds, leaves, branches, fruit, and the like are included in the invention, provided that these parts comprise cells comprising the isolated nucleic acid of the present invention. Progeny and variants, and mutants of the regenerated plants are also included within the scope of the invention, provided that these parts comprise the introduced nucleic acid sequences.

[0224] Transgenic plants expressing a polynucleotide of the present invention can be screened for transmission of the nucleic acid of the present invention by, for example, standard immunoblot and DNA detection techniques. Expression at the RNA level can be determined initially to identify and quantitate expression-positive plants. Standard techniques for RNA analysis can be employed and include PCR amplification assays using oligonucleotide primers designed to amplify only the heterologous RNA templates and solution hybridization assays using heterologous nucleic acid-specific probes. The RNA-positive plants can then analyzed for protein expression by Western immunoblot analysis using the specifically reactive antibodies of the present invention. In addition, in situ hybridization and immunocytochemistry according to standard protocols can be done using heterologous nucleic acid specific polynucleotide probes and antibodies, respectively, to localize sites of expression within transgenic tissue. Generally, a number of transgenic lines are usually screened for the incorporated nucleic acid to identify and select plants with the most appropriate expression profiles.

[0225] A preferred embodiment is a transgenic plant that is homozygous for the added heterologous nucleic acid; i.e., a transgenic plant that contains two added nucleic acid sequences, one gene at the same locus on each chromosome of a chromosome pair. A homozygous transgenic plant can be obtained by sexually mating (selfing) a heterozygous transgenic plant that contains a single added heterologous nucleic acid, germinating some of the seed produced and analyzing the resulting plants produced for altered expression of a polynucleotide of the present invention relative to a control plant (i.e., native, non-transgenic). Back-crossing to a parental plant and out-crossing with a non-transgenic plant are also contemplated.

[0226] Modulating Polypeptide Levels and/or Composition

[0227] The present invention further provides a method for modulating (i.e., increasing or decreasing) the concentration or ratio of the polypeptides of the present invention in a plant or part thereof. Modulation can be effected by increasing or decreasing the concentration and/or the ratio of the polypeptides of the present invention in a plant. The method comprises introducing into a plant cell a recombinant expression cassette comprising a polynucleotide of the present invention as described above to obtain a transgenic plant cell, culturing the transgenic plant cell under transgenic plant cell growing conditions, and inducing or repressing expression of a polynucleotide of the present invention in the transgenic plant for a time sufficient to modulate concentration and/or the ratios of the polypeptides in the transgenic plant or plant part.

[0228] In some embodiments, the concentration and/or ratios of polypeptides of the present invention in a plant may be modulated by altering, in vivo or in vitro, the promoter of a gene to up- or down-regulate gene expression. In some embodiments, the coding regions of native genes of the present invention can be altered via substitution, addition, insertion, or deletion to decrease activity of the encoded enzyme. See e.g., Kmiec, U.S. Pat. No. 5,565,350; Zarling et al., PCT/US93/03868. And in some embodiments, an isolated nucleic acid (e.g., a vector) comprising a promoter sequence is transfected into a plant cell. Subsequently, a plant cell comprising the promoter operably linked to a polynucleotide of the present invention is selected for by means known to those of skill in the art such as, but not limited to, Southern blot, DNA sequencing, or PCR analysis using primers specific to the promoter and to the gene and detecting amplicons produced therefrom. A plant or plant part altered or modified by the foregoing embodiments is grown under plant forming conditions for a time sufficient to modulate the concentration and/or ratios of polypeptides of the present invention in the plant. Plant forming conditions are well known in the art and discussed briefly, supra.

[0229] In general, concentration or the ratios of the polypeptides is increased or decreased by at least 5%, 10%, 20%, 30%, 40%, 50%, 60%, 70%, 80%, or 90% relative to a native control plant, plant part, or cell lacking the aforementioned recombinant expression cassette. Modulation in the present invention may occur during and/or subsequent to growth of the plant to the desired stage of development. Modulating nucleic acid expression temporally and/or in particular tissues can be controlled by employing the appropriate promoter operably linked to a polynucleotide of the present invention in, for example, sense or antisense orientation as discussed in greater detail, supra. Induction of expression of a polynucleotide of the present invention can also be controlled by exogenous administration of an effective amount of inducing compound. Inducible promoters and inducing compounds which activate expression from these promoters are well known in the art. In preferred embodiments, the polypeptides of the present invention are modulated in monocots, particularly maize.

[0230] UTRs and Codon Preference

[0231] In general, translational efficiency has been found to be regulated by specific sequence elements in the 5′ non-coding or untranslated region (5′ UTR) of the RNA. Positive sequence motifs include translational initiation consensus sequences (Kozak, Nucleic Acids Res. 15:8125 (1987)) and the 7-methylguanosine cap structure (Drummond et al., Nucleic Acids Res. 13:7375 (1985)). Negative elements include stable intramolecular 5′ UTR stem-loop structures (Muesing et al., Cell 48:691 (1987)) and AUG sequences or short open reading frames preceded by an appropriate AUG in the 5′ UTR (Kozak, supra, Rao et al., Mol. and Cell. Biol. 8:284 (1988)). Accordingly, the present invention provides 5′ and/or 3′ untranslated regions for modulation of translation of heterologous coding sequences.

[0232] Further, the polypeptide-encoding segments of the polynucleotides of the present invention can be modified to alter codon usage. Altered codon usage can be employed to alter translational efficiency and/or to optimize the coding sequence for expression in a desired host such as to optimize the codon usage in a heterologous sequence for expression in maize. Codon usage in the coding regions of the polynucleotides of the present invention can be analyzed statistically using commercially available software packages such as “Codon Preference” available from the University of Wisconsin Genetics Computer Group (see Devereaux et al., Nucleic Acids Res. 12:387-395 (1984)) or MacVector 4.1 (Eastman Kodak Co., New Haven, Conn.). Thus, the present invention provides a codon usage frequency characteristic of the coding region of at least one of the polynucleotides of the present invention. The number of polynucleotides that can be used to determine a codon usage frequency can be any integer from 1 to the number of polynucleotides of the present invention as provided herein. Optionally, the polynucleotides will be full-length sequences. An exemplary number of sequences for statistical analysis can be at least 1, 5, 10, 20, 50, or 100.

[0233] Sequence Shuffling

[0234] The present invention provides methods for sequence shuffling using polynucleotides of the present invention, and compositions resulting therefrom. Sequence shuffling is described in PCT publication No. WO 97/20078. See also, Zhang, J.-H. et al., Proc. Natl. Acad. Sci. USA 94:4504-4509 (1997). Generally, sequence shuffling provides a means for generating libraries of polynucleotides having a desired characteristic which can be selected or screened for. Libraries of recombinant polynucleotides are generated from a population of related sequence polynucleotides which comprise sequence regions which have substantial sequence identity and can be homologously recombined in vitro or in vivo. The population of sequence-recombined polynucleotides comprises a subpopulation of polynucleotides which possess desired or advantageous characteristics and which can be selected by a suitable selection or screening method. The characteristics can be any property or attribute capable of being selected for or detected in a screening system, and may include properties of: an encoded protein, a transcriptional element, a sequence controlling transcription, RNA processing, RNA stability, chromatin conformation, translation, or other expression property of a gene or transgene, a replicative element, a protein-binding element, or the like, such as any feature which confers a selectable or detectable property. In some embodiments, the selected characteristic will be a decreased Kₘ and/or increased K_{cat} over the wild-type protein as provided herein. In other embodiments, a protein or polynucleotide generated from sequence shuffling will have a ligand binding affinity greater than the non-shuffled wild-type polynucleotide. The increase in such properties can be at least 110%, 120%, 130%, 140% or at least 150% of the wild-type value.

[0235] Generic and Consensus Sequences

[0236] Polynucleotides and polypeptides of the present invention further include those having: (a) a generic sequence of at least two homologous polynucleotides or polypeptides, respectively, of the present invention; and, (b) a consensus sequence of at least three homologous polynucleotides or polypeptides, respectively, of the present invention. The generic sequence of the present invention comprises each species of polypeptide or polynucleotide embraced by the generic polypeptide or polynucleotide sequence, respectively. The individual species encompassed by a polynucleotide having an amino acid or nucleic acid consensus sequence can be used to generate antibodies or produce nucleic acid probes or primers to screen for homologs in other species, genera, families, orders, classes, phyla, or kingdoms. For example, a polynucleotide having a consensus sequence from a gene family of Zea mays can be used to generate antibody or nucleic acid probes or primers to other Gramineae species such as wheat, rice, or sorghum. Alternatively, a polynucleotide having a consensus sequence generated from orthologous genes can be used to identify or isolate orthologs of other taxa. Typically, a polynucleotide having a consensus sequence will be at least 9, 10, 15, 20, 25, 30, or 40 amino acids in length, or 20, 30, 40, 50, 100, or 150 nucleotides in length. As those of skill in the art are aware, a conservative amino acid substitution can be used for amino acids which differ amongst aligned sequence but are from the same conservative substitution group as discussed above. Optionally, no more than 1 or 2 conservative amino acids are substituted for each 10 amino acid length of consensus sequence.

[0237] Similar sequences used for generation of a consensus or generic sequence include any number and combination of allelic variants of the same gene, orthologous, or paralogous sequences as provided herein. Optionally, similar sequences used in generating a consensus or generic sequence are identified using the BLAST algorithm's smallest sum probability (P(N)). Various suppliers of sequence-analysis software are listed in chapter 7 of Current Protocols in Molecular Biology, F. M. Ausubel et al., Eds., Current Protocols, a joint venture between Greene Publishing Associates, Inc. and John Wiley & Sons, Inc. (Supplement 30). A polynucleotide sequence is considered similar to a reference sequence if the smallest sum probability in a comparison of the test nucleic acid to the reference nucleic acid is less than about 0.1, more preferably less than about 0.01, or 0.001, and most preferably less than about 0.0001, or 0.00001. Similar polynucleotides can be aligned and a consensus or generic sequence generated using multiple sequence alignment software available from a number of commercial suppliers such as the Genetics Computer Group's (Madison, Wis.) PILEUP software, Vector NTI's (North Bethesda, Md.) ALIGNX, or Genecode's (Ann Arbor, Mich.) SEQUENCHER. Conveniently, default parameters of such software can be used to generate consensus or generic sequences.

[0238] Machine Applications

[0239] The present invention provides machines, articles of manufacture, and processes for identifying, modeling, or analyzing the polynucleotides and polypeptides of the present invention. Identification methods permit identification of homologues of the polynucleotides or polypeptides of the present invention while modeling and analysis methods permit recognition of structural or functional features of interest.

[0240] A. Machines: Data Processing Systems

[0241] In one embodiment, the present invention provides a machine having: 1) a memory comprising data representing at least one genetic sequence, 2) a genetic identification, analysis, or modeling program with access to the data, 3) a data processor which executes instructions according to the program using the genetic sequence or a subsequence thereof, and 4) an output for storing or displaying the results of the data processing.

[0242] The machine of the present invention is a data processing system, typically a digital computer. The term “computer” includes one or several desktop or portable computers, computer workstations, servers (including intranet or internet servers), mainframes, and any integrated system comprising any of the above irrespective of whether the processing, memory, input, or output of the computer is remote or local, as well as any networking interconnecting the modules of the computer. Data processing can thus be remote or distributed amongst several processors at one or multiple sites. The data processing system comprises a data processor, such as a central processing unit (CPU), which executes instructions according to an application program. As used herein, machines, articles of manufacture, and processes are exclusive of the machines, manufactures, and processes employed by the United States Patent and Trademark Office or the European Patent Office when data representing the sequence of a polypeptide or polynucleotide of the present invention is used for patentability searches.

[0243] The machine of the present invention includes a memory comprising data representing at least one genetic sequence. As used herein, “genetic sequence” refers to the primary sequence (i.e., amino acid or nucleotide sequence) of a polynucleotide or polypeptide of the present invention. The genetic sequence can represent a partial sequence from a full-length protein, genomic DNA, or full-length cDNA/mRNA. Nucleic acids or proteins comprising a genetic sequence that is identified, analyzed, or modeled according to the present invention can be cloned or synthesized.

[0244] As those of skill in the art will be aware, the form of memory of a machine of the present invention, or the particular embodiment of the computer readable medium, are not critical elements of the invention and can take a variety of forms. The memory of such a machine includes, but is not limited to, ROM, or RAM, or computer readable media such as, but not limited to, magnetic media such as computer disks or hard drives, or media such as CD-ROMs, DVDs, and the like. The memory comprising the data representing the genetic sequence includes main memory, a register, and a cache. In some embodiments the data processing system stores the data representing the genetic sequence in memory while processing the data and wherein successive portions of the data are copied sequentially into at least one register of the data processor for processing. Thus, the genetic sequence stored in memory can be a genetic sequence created during computer runtime or stored beforehand. The machine of the present invention includes a genetic identification, analysis, or modeling program (discussed below) with access to the data representing the genetic sequence. The program can be implemented in software or hardware.

[0245] The present invention further contemplates that the machine of the present invention will reference, directly or indirectly, a utility or function for the polynucleotide or polypeptide of the present invention. For example, the utility/function can be directly referenced as a data element in the machine and accessible by the program. Alternatively, the utility/function of the genetic can be indirectly referenced to an electronic or written record. The function or utility of the genetic sequence can be a function or utility for the genetic sequence, or the data representing the sequence (i.e., the genetic sequence data). Exemplary function or utilities for the genetic sequence include: 1) its name (per International Union of Biochemistry and Molecular Biology rules of nomenclature) or the function of the enzyme or protein represented by the genetic sequence, 2) the metabolic pathway that the protein represented by the genetic sequence participates in, 3) the substrate or product or structural role of the protein represented by the genetic sequence, or, 4) the phenotype (e.g., an agronomic or pharmacological trait) affected by modulating expression or activity of the protein represented by the genetic sequence.

[0246] The machine of the present invention also includes an output for displaying, printing, or recording the results of the identification, analysis, or modeling performed using a genetic sequence of the present invention. Exemplary outputs include monitors, printers, or various electronic storage mechanisms (e.g., floppy disks, hard drives, main memory) which can be used to display the results or employed as a means to input the stored data into a subsequent application or device.

[0247] In some embodiments, data representing a genetic sequence of the present invention is a data element within a data structure. The data structure may be defined by the computer programs that define the processes of identification, modeling, or analysis (see below) or it may be defined by the programming of separate data storage and retrieval programs subroutines or systems. Thus, the present invention provides a memory for storing a data structure that can be accessed by a computer programmed to implement a process for identification, analysis, or modeling of a genetic sequence. The data structure, stored within memory, is associated with the data representing the genetic sequence and reflects the underlying organization and structure of the genetic sequence to facilitate program access to data elements corresponding to logical sub-components of the genetic sequence. The data structure enables the genetic sequence to be identified, analyzed, or modeled. The underlying order and structure of a genetic sequence is data representing the higher order organization of the primary sequence. Such higher order structures affect transcription, translation, enzyme kinetics, or reflects structural domains or motifs. Exemplary logical sub-components which constitute the higher order organization of the genetic sequence include but are not limited to: restriction enzyme sites, endopeptidase sites, major grooves, minor grooves, beta-sheets, alpha helices, open reading frames (ORFs), 5′ untranslated regions (UTRs), 3′ UTRs, ribosome binding sites, glycosylation sites, signal peptide domains, intron-exon junctions, poly-A tails, transcription initiation sites, translation start sites, translation termination sites, methylation sites, zinc finger domains, modified amino acid sites, preproprotein-proprotein junctions, proprotein-protein junctions, transit peptide domains, single nucleotide polymorphisms (SNPs), simple sequence repeats (SSRs), restriction fragment length polymorphisms (RFLPs), insertion elements, transmembrane spanning regions, and stem-loop structures.

[0248] In another embodiment, the present invention provides a data processing system comprising at least one data structure in memory where the data structure supports the accession of data representing a genetic sequence of the present invention. The system also comprises at least one genetic identification, analysis, or modeling program which directs the execution of instructions by the system using the genetic sequence data to identify, analyze, or model at least one data element which is a logical sub-component of the genetic sequence. An output for the processing results is also provided.

[0249] B. Articles of Manufacture: Computer Readable Media

[0250] In one embodiment, the present invention provides a data structure in a computer readable medium that contains data representing a genetic sequence of the present invention. The data structure is organized to reflect the logical structuring of the genetic sequence, so that the sequence can be analyzed by software programs capable of accessing the data structure. In particular, the data structures of the present invention organize the genetic sequences of the present invention in a manner which allows software tools to perform an identification, analysis, or modeling using logical elements of each genetic sequence.

[0251] In a further embodiment, the present invention provides a machine-readable media containing a computer program and genetic sequence data. The program provides instructions sufficient to implement a process for effecting the identification, analysis, or modeling of the genetic sequence data. The media also includes a data structure reflecting the underlying organization and structure of the data to facilitate program access to data elements corresponding to logical sub-components of the genetic sequence, the data structure being inherent in the program and in the way in which the program organizes and accesses the data.

[0252] An example of a data structure resembles a layered hash table, where in one dimension the base content of the sequence is represented by a string of elements A, T, C, G and N. The direction from the 5′ end to the 3′ end is reflected by the order from the position 0 to the position of the length of the string minus one. Such a string, corresponding to a nucleotide sequence of interest, has a certain number of substrings, each of which is delimited by the string position of its 5′ end and the string position of its 3′ end within the parent string. In a second dimension, each substring is associated with or pointed to one or multiple attribute fields. Such attribute fields contain annotations to the region on the nucleotide sequence represented by the substring.

[0253] For example, a sequence under investigation is 520 bases long and represented by a string named SeqTarget. There is a minor groove in the 5′ upstream non-coding region from position 12 to 38, which is identified as a binding site for an enhancer protein HM-A, which in turn will increase the transcription of the gene represented by SeqTarget. Here, the substring is represented as (12, 38) and has the following attributes: [upstream uncoded], [minor groove], [HM-A binding] and [increase transcription upon binding by HM-A]. Similarly, other types of information can be stored and structured in this manner, such as information related to the whole sequence, e.g., whether the sequence is a full length viral gene, a mammalian house keeping gene or an EST from clone X, information related to the 3′ down stream non-coding region, e.g., hair pin structure, and information related to various domains of the coding region, e.g., Zinc finger.

[0254] This data structure is an open structure and is robust enough to accommodate newly generated data and acquired knowledge. Such a structure is also a flexible structure. It can be trimmed down to a 1-D string to facilitate data mining and analysis steps, such as clustering, repeat-masking, and HMM analysis. Meanwhile, such a data structure also can extend the associated attributes into multiple dimensions. Pointers can be established among the dimensioned attributes when needed to facilitate data management and processing in a comprehensive genomics knowledgebase. Furthermore, such a data structure is object-oriented. Polymorphism can be represented by a family or class of sequence objects, each of which has an internal structure as discussed above. The common traits are abstracted and assigned to the parent object, whereas each child object represents a specific variant of the family or class. Such a data structure allows data to be efficiently retrieved, updated and integrated by the software applications associated with the sequence database and/or knowledgebase.

[0255] C. Processes: Identification, Analysis, or Modeling

[0256] The present invention also provides a process of identifying, analyzing, or modeling data representing a genetic sequence of the present invention. The process comprises: 1) providing a machine having a hardware or software implemented genetic sequence identification, modeling, or analysis program with data representing a genetic sequence, 2) executing the program while granting it access to the genetic sequence data, and 3) displaying or outputting the results of the identification, analysis, or modeling. Data structures made by the processes of the present invention and embodied within a computer readable medium are also provided herein.

[0257] A further process of the present invention comprises providing a memory embodied with data representing a genetic sequence and developing within the memory a data structure associated with the data and reflecting the underlying organization and structure of the data to facilitate program access to data elements corresponding to logical sub-components of the sequence. A computer is programmed with a program containing instructions sufficient to implement the process for effecting the identification, analysis, or modeling of the genetic sequence and the program is executed on the computer while granting the program access to the data and to the data structure within the memory. The program results are outputted.

[0258] Identification, analysis, and modeling programs are well known in the art and available commercially. The program typically has at least one application to: 1) identify the structural role or enzymatic function of the gene which the genetic sequence encodes or is translated from, 2) analyzes and identifies higher order structures within the genetic sequence or, 3) model the physico-chemical properties of a genetic sequence of the present invention in a particular environment.

[0259] Included amongst the modeling/analysis tools are methods to: 1) recognize overlapping sequences (e.g., from a sequencing project) with a polynucleotide of the present invention and create an alignment called a “contig”; 2) identify restriction enzyme sites of a polynucleotide of the present invention; 3) identify the products of a T1 ribonuclease digestion of a polynucleotide of the present invention; 4) identify PCR primers with minimal self-complementarity; 5) compute pairwise distances between sequences in an alignment, reconstruct phylogentic trees using distance methods, and calculate the degree of divergence of two protein coding regions; 6) identify patterns such as coding regions, terminators, repeats, and other consensus patterns in polynucleotides of the present invention; 7) identify RNA secondary structure; 8) identify sequence motifs, isoelectric point, secondary structure, hydrophobicity, and antigenicity in polypeptides of the present invention; 9) translate polynucleotides of the present invention and backtranslate polypeptides of the present invention; and 10) compare two protein or nucleic acid sequences and identifying points of similarity or dissimilarity between them.

[0260] Identification of the function/utility of a genetic sequence is typically achieved by comparative analysis to a gene/protein database and establishing the genetic sequence as a candidate homologue (i.e., ortholog or paralog) of a gene/protein of known function/utility. A candidate homologue has statistically significant probability of having the same biological function (e.g., catalyzes the same reaction, binds to homologous proteins/nucleic acids, has a similar structural role) as the reference sequence to which it is compared. Sequence identity/similarity is frequently employed as a criterion to identify candidate homologues. In the same vein, genetic sequences of the present invention have utility in identifying homologs in animals or other plant species, particularly those in the family Gramineae such as, but not limited to, sorghum, wheat, or rice. Function is frequently established on the basis of sequence identity/similarity.

[0261] Exemplary sequence comparison systems are provided for in sequence analysis software such as those provided by the Genetics Computer Group (Madison, Wis.) or InforMax (Bethesda, Md.), or Intelligenetics (Mountain View, Calif.). Optionally, sequence comparison is established using the BLAST or GAP suite of programs. Generally, a smallest sum probability value (P(N)) of less than 0.1, or alternatively, less than 0.01, 0.001, 0.0001, or 0.00001 using the BLAST 2.0 suite of algorithms under default parameters identifies the test sequence as a candidate homologue (i.e., an allele, ortholog, or paralog) of a reference sequence. Those of skill in the art will recognize that a candidate homologue has an increased statistical probability of having the same or similar function as the gene/protein represented by the test sequence.

[0262] The software/hardware for effecting identification, analysis, or modeling can be produced independently or obtained from commercial suppliers. Exemplary identification, analysis, and modeling tools are provided in products such as InforMax's (Bethesda, Md.) Vector NTI Suite (Version 5.5), Intelligenetics' (Mountain View, Calif.) PC/Gene program, and Genetics Computer Group's (Madison, Wis.) Wisconsin Package (Version 10.0); these tools, and the functions they perform, (as provided and disclosed by the programs and accompanying literature) are incorporated herein by reference.

[0263] Detection of Nucleic Acids

[0264] The present invention further provides methods for detecting a polynucleotide of the present invention in a nucleic acid sample suspected of containing a polynucleotide of the present invention, such as a plant cell lysate, particularly a lysate of maize. In some embodiments, a cognate gene of a polynucleotide of the present invention or portion thereof can be amplified prior to the step of contacting the nucleic acid sample with a polynucleotide of the present invention. The nucleic acid sample is contacted with the polynucleotide to form a hybridization complex. The polynucleotide hybridizes under stringent conditions to a gene encoding a polypeptide of the present invention. Formation of the hybridization complex is used to detect a gene encoding a polypeptide of the present invention in the nucleic acid sample. Those of skill will appreciate that an isolated nucleic acid comprising a polynucleotide of the present invention should lack cross-hybridizing sequences in common with non-target genes that would yield a false positive result. Detection of the hybridization complex can be achieved using any number of well known methods. For example, the nucleic acid sample, or a portion thereof, may be assayed by hybridization formats including but not limited to, solution phase, solid phase, mixed phase, or in situ hybridization assays.

[0265] Detectable labels suitable for use in the present invention include any composition detectable by spectroscopic, radioisotopic, photochemical, biochemical, immunochemical, electrical, optical or chemical means. Useful labels in the present invention include biotin for staining with labeled streptavidin conjugate, magnetic beads, fluorescent dyes, radiolabels, enzymes, and calorimetric labels. Other labels include ligands which bind to antibodies labeled with fluorophores, chemiluminescent agents, and enzymes. Labeling the nucleic acids of the present invention is readily achieved such as by the use of labeled PCR primers.

[0266] Although the present invention has been described in some detail by way of illustration and example for purposes of clarity of understanding, it will be obvious that certain changes and modifications may be practiced within the scope of the appended claims.

### EXAMPLE 1

[0267] This example describes the construction of a cDNA library.

[0268] Total RNA can be isolated from maize tissues with TRIzol Reagent (Life Technology Inc., Gaithersburg, MD) using a modification of the guanidine isothiocyanate/acid-phenol procedure described by Chomczynski and Sacchi (Chomczynski, P., and Sacchi, N. Anal. Biochem. 162, 156 (1987)). In brief, plant tissue samples is pulverized in liquid nitrogen before the addition of the TRIzol Reagent, and then further homogenized with a mortar and pestle. Addition of chloroform followed by centrifugation is conducted for separation of an aqueous phase and an organic phase. The total RNA is recovered by precipitation with isopropyl alcohol from the aqueous phase.

[0269] The selection of poly(A)+RNA from total RNA can be performed using PolyATact system (Promega Corporation. Madison, Wis.). Biotinylated oligo(dT) primers are used to hybridize to the 3′ poly(A) tails on mRNA. The hybrids are captured using streptavidin coupled to paramagnetic particles and a magnetic separation stand. The mRNA is then washed at high stringency conditions and eluted by RNase-free deionized water.

[0270] cDNA synthesis and construction of unidirectional cDNA libraries can be accomplished using the SuperScript Plasmid System (Life Technology Inc., Gaithersburg, Md.). The first strand of cDNA is synthesized by priming an oligo(dT) primer containing a Not I site. The reaction is catalyzed by SuperScript Reverse Transcriptase II at 45° C. The second strand of cDNA is labeled with alpha-³²P-dCTP and a portion of the reaction analyzed by agarose gel electrophoresis to determine cDNA sizes. cDNA molecules smaller than 500 base pairs and unligated adapters are removed by Sephacryl-S400 chromatography. The selected cDNA molecules are ligated into pSPORT1 vector in between of Not I and Sal I sites.

[0271] Alternatively, cDNA libraries can be prepared by any one of many methods available. For example, the cDNAs may be introduced into plasmid vectors by first preparing the cDNA libraries in Uni-ZAP™ XR vectors according to the manufacturer's protocol (Stratagene Cloning Systems, La Jolla, Calif.). The Uni-ZAP™ XR libraries are converted into plasmid libraries according to the protocol provided by Stratagene. Upon conversion, cDNA inserts will be contained in the plasmid vector pBluescript. In addition, the cDNAs may be introduced directly into precut Bluescript II SK(+) vectors (Stratagene) using T4 DNA ligase (New England Biolabs), followed by transfection into DH10B cells according to the manufacturer's protocol (GIBCO BRL Products). Once the cDNA inserts are in plasmid vectors, plasmid DNAs are prepared from randomly picked bacterial colonies containing recombinant pBluescript plasmids, or the insert cDNA sequences are amplified via polymerase chain reaction using primers specific for vector sequences flanking the inserted cDNA sequences. Amplified insert DNAs or plasmid DNAs are sequenced in dye-primer sequencing reactions to generate partial cDNA sequences (expressed sequence tags or “ESTs”; see Adams et al., (1991) Science 252:1651-1656). The resulting ESTs are analyzed using a Perkin Elmer Model 377 fluorescent sequencer.

### EXAMPLE 2

[0272] This method describes construction of a full-length enriched cDNA library.

[0273] An enriched full-length cDNA library can be constructed using one of two variations of the method of Carninci et al., Genomics 37:327-336, 1996. These variations are based on chemical introduction of a biotin group into the diol residue of the 5′ cap structure of eukaryotic mRNA to select full-length first strand cDNA. The selection occurs by trapping the biotin residue at the cap sites using streptavidin-coated magnetic beads followed by RNase I treatment to eliminate incompletely synthesized cDNAs. Second strand cDNA is synthesized using established procedures such as those provided in Life Technologies' (Rockville, Md.) “SuperScript Plasmid System for cDNA Synthesis and Plasmid Cloning” kit. Libraries made by this method have been shown to contain 50% to 70% full-length cDNAs.

[0274] The first strand synthesis methods are detailed below. An asterisk denotes that the reagent was obtained from Life Technologies, Inc.

[0275] A. First strand cDNA synthesis method 1 (with trehalose)

| | | |
|---|---|---|
| mRNA (10 ug) | 25 | μl |
| *Not I primer (5 ug) | 10 | μl |
| *5× 1^{st} strand buffer | 43 | μl |
| *0.1 m DTT | 20 | μl |
| *dNTP mix 10 mm | 10 | μl |
| BSA 10 ug/μl | 1 | μl |
| Trehalose (saturated) | 59.2 | μl |
| RNase inhibitor (Promega) | 1.8 | μl |
| *Superscript II RT 200 u/μl | 20 | μl |
| 100% glycerol | 18 | μl |
| Water | 7 | μl |

[0276] The mRNA and Not I primer are mixed and denatured at 65° C. for 10 min. They are then chilled on ice and other components added to the tube. Incubation is at 45° C. for 2 min. Twenty microliters of RT (reverse transcriptase) is added to the reaction and start program on the thermocycler (MJ Research, Waltham, Mass.):

| | | |
|---|---|---|
| Step 1 | 45° C. | 10 min |
| Step 2 | 45° C. | −0.3° C./cycle, 2 seconds/cycle |
| Step 3 | go to 2 for 33 cycles | |
| Step 4 | 35° C. | 5 min |
| Step 5 | 45° C. | 5 min |
| Step 6 | 45° C. | 0.2° C./cycle, 1 sec/cycle |
| Step 7 | go to 7 for 49 cycles | |
| Step 8 | 55° C. | 0.1° C./cycle, 12 sec/cycle |
| Step 9 | go to 8 for 49 cycles | |
| Step 10 | 55° C. | 2 min |
| Step 11 | 60° C. | 2 min |
| Step 12 | go to 11 for 9 times | |
| Step 13 | 4° C. forever | |
| Step 14 | end | |

[0277] B. First Strand cDNA Synthesis Method 2

| mRNA (10 μg) | 25 | μl |
|---|---|---|
| water | 30 | μl |
| *Not I adapter primer (5 μg) | 10 | μl |
| 65° C. for 10 min, chill on ice, then add following reagents, | | |
| *5× first buffer | 20 | μl |
| *0.1M DTT | 10 | μl |
| *10 mM dNTP mix | 5 | μl |

[0278] Incubate at 45° C. for 2 min, then add 10 μl of *Superscript II RT (200 μ/μl), start the following program:

| | |
|---|---|
| Step 1 | 45° C. for 6 sec, −0.1° C./cycle |
| Step 2 | go to 1 for 99 additional cycles |
| Step 3 | 35° C. for 5 min |
| Step 4 | 45° C. for 60 min |
| Step 5 | 50° C. for 10 min |
| Step 6 | 4° C. forever |
| Step 7 | end |

[0279] After the 1^{St} strand cDNA synthesis, the DNA is extracted by phenol according to standard procedures, and then precipitated in NaOAc and ethanol, and stored in −20° C.

[0280] C. Oxidization of the Diol Group of mRNA for Biotin Labeling

[0281] First strand cDNA is spun down and washed once with 70% EtOH. The pellet resuspended in 23.2 μl of DEPC treated water and put on ice. Prepare 100 mM of NaIO4 freshly, and then add the following reagents:

| | | |
|---|---|---|
| mRNA: 1^{st} cDNA (start with 20 μg mRNA) | 46.4 | μl |
| 100 mM NaIO4 (freshly made) | 2.5 | μl |
| NaOAc 3M pH 4.5 | 1.1 | μl |

[0282] To make 100 mM NaIO4, use 21.39 μg of NaIO4 for 1 μl of water. Wrap the tube in a foil and incubate on ice for 45 min. After the incubation, the reaction is then precipitated in:

| | | |
|---|---|---|
| 5M NaCl | 10 | μl |
| 20% SDS | 0.5 | μl |
| isopropanol | 61 | μl |

[0283] Incubate on ice for at least 30 min, then spin it down at max speed at 4° C. for 30 min and wash once with 70% ethanol and then 80% EtOH.

[0284] D. Biotinylation of the mRNA Diol Group

[0285] Resuspend the DNA in 110 μl DEPC treated water, then add the following reagents:

| | | |
|---|---|---|
| 20% SDS | 5 | μl |
| 2 M NaOAc pH 6.1 | 75 | μl |
| 10 mm biotin hydrazide (freshly made) | 300 | μl |

[0286] Wrap in a foil and incubate at room temperature overnight.

[0287] E. RNase I Treatment

[0288] Precipitate DNA in:

| | | |
|---|---|---|
| 5M NaCl | 10 | μl |
| 2M NaOAc pH 6.1 | 75 | μl |
| biotinylated mRNA:cDNA | 420 | μl |
| 100% EtOH (2.5 Vol) | 1262.5 | μl |

[0289] (Perform this precipitation in two tubes and split the 420 μl of DNA into 210 μl each, add 5 μl of 5 M NaCl, 37.5 μl of 2 M NaOAc pH 6.1, and 631.25 μl of 100% EtOH). Store at −20° C. for at least 30 min. Spin the DNA down at 4° C. at maximal speed for 30 min. and wash with 80% EtOH twice, then dissolve DNA in 70 μl RNase free water. Pool two tubes and end up with 140 μl.

[0290] Add the following reagents:

| | | |
|---|---|---|
| RNase One 10 U/μl | 40 | μl |
| 1^{st} cDNA:RNA | 140 | μl |
| 10× buffer | 20 | μl |

[0291] Incubate at 37° C. for 15 min.

[0292] Add 5 μl of 40 μg/μl yeast tRNA to each sample for capturing.

[0293] F. Full Length 1^{st} cDNA Capturing

[0294] Blocking the beads with yeast tRNA:

| | | |
|---|---|---|
| Beads | 1 | ml |
| Yeast tRNA 40 μg/μl | 5 | μl |

[0295] Incubate on ice for 30 min with mixing, wash 3 times with 1 ml of 2 M NaCl, 50 mm EDTA, pH 8.0.

[0296] Resuspend the beads in 800 μl of 2 M NaCl, 50 mm EDTA, pH 8.0, add RNase I treated sample 200 μl, and incubate the reaction for 30 min at room temperature. Capture the beads using the magnetic stand, save the supernatant, and start following washes: 2 washes with 2 M NaCl, 50 mm EDTA, pH 8.0, 1 ml each time, 1 wash with 0.4% SDS, 50 μg/ml tRNA, 1 wash with 10 mm Tris-Cl pH 7.5, 0.2 mm EDTA, 10 mm NaCl, 20% glycerol, 1 wash with 50 μg/ml tRNA, 1 wash with 1^{st} cDNA buffer.

[0297] G. Second Strand cDNA Synthesis

[0298] Resuspend the beads in:

| | | |
|---|---|---|
| *5X first buffer | 8 | μl |
| *0.1 mM DTT | 4 | μl |
| *10 mm dNTP mix | 8 | μl |
| *5X 2nd buffer | 60 | μl |
| *E. coli Ligase 10 U/μl | 2 | μl |
| *E. coli DNA polymerase 10 U/μl | 8 | μl |
| *E. coli RNaseH 2 U/μl | 2 | μl |
| P32 dCTP 10 μci/μl | 2 | μl |
| Or water up to 300 μl | 208 | μl |

[0299] Incubate at 16° C. for 2 hr with mixing the reaction in every 30 min. Add 4 μl of T4 DNA polymerase and incubate for additional 5 min at 16° C. Elute ₂^{nd} cDNA from the beads. Use a magnetic stand to separate the 2^{nd} cDNA from the beads, then resuspend the beads in 200 μl of water, and then separate again, pool the samples (about 500 μl). Add 200 μl of water to the beads, then 200 μl of phenol:chloroform, vortex, and spin to separate the sample with phenol. Pool the DNA together (about 700 μl) and use phenol to clean the DNA again, DNA is then precipitated in 2 μg of glycogen and 0.5 vol of 7.5 M NH4OAc and 2 vol of 100% EtOH. Precipitate overnight. Spin down the pellet and wash with 70% EtOH, air-dry the pellet.

| | | | |
|---|---|---|---|
| DNA | 250 μl | DNA | 200 μl |
| 7.5 M NH4OAc | 125 μl | 7.5 M NH4OAc | 100 μl |
| 100% EtOH | 750 μl | 100% EtOH | 600 μl |
| glycogen 1 μg/μl | 2 μl | glycogen 1 μg/μl | 2 μl |

[0300] H. Sal I Adapter Ligation

[0301] Resuspend the pellet in 26 μl of water and use 1 μl for TAB gel.

[0302] Set up reaction as following:

| | |
|---|---|
| 2nd strand cDNA | 25 μl |
| *5X T4 DNA ligase buffer | 10 μl |
| *Sal I adapters | 10 μl |
| *T4 DNA ligase | 5 μl |

[0303] Mix gently, incubate the reaction at 16° C. overnight. Add 2 μl of ligase second day and incubate at room temperature for 2 hrs (optional).

[0304] Add 50 μl water to the reaction and use 100 μl of phenol to clean the DNA, 90 μl of the upper phase is transferred into a new tube and precipitate in:

| | |
|---|---|
| Glycogen 1 μg/μl | 2 μl |
| Upper phase DNA | 90 μl |
| 7.5 M NH4OAc | 50 μl |
| 100% EtOH | 300 μl |

[0305] Precipitate at −20° C. overnight. Spin down the pellet at 4° C. and wash in 70% EtOH, dry the pellet.

[0306] I. Not I Digestion

| | |
|---|---|
| 2nd cDNA | 41 μl |
| *Reaction 3 buffer | 5 μl |
| *Not I 15 μ/μl | 4 μl |

[0307] Mix gently and incubate the reaction at 37° C. for 2 hr. Add 50 μl of water and 100 μl of phenol, vortex, and take 90 μl of the upper phase to a new tube, then add 50 μl of NH40Ac and 300 μl of EtOH. Precipitate overnight at −20° C.

[0308] Cloning, ligation, and transformation are performed per the Superscript cDNA synthesis kit.

### EXAMPLE 3

[0309] This example describes cDNA sequencing and library subtraction.

[0310] Individual colonies can be picked and DNA prepared either by PCR with M13 forward primers and M13 reverse primers, or by plasmid isolation. cDNA clones can be sequenced using M13 reverse primers.

[0311] cDNA libraries are plated out on 22×22 cm² agar plate at density of about 3,000 colonies per plate. The plates are incubated in a 37° C. incubator for 12-24 hours. Colonies are picked into 384-well plates by a robot colony picker, Q-bot (GENETIX Limited). These plates are incubated overnight at 37° C. Once sufficient colonies are picked, they are pinned onto 22×22 cm² nylon membranes using Q-bot. Each membrane holds 9,216 or 36,864 colonies. These membranes are placed onto an agar plate with an appropriate antibiotic. The plates are incubated at 37° C. overnight.

[0312] After colonies are recovered on the second day, these filters are placed on filter paper prewetted with denaturing solution for four minutes, then incubated on top of a boiling water bath for an additional four minutes. The filters are then placed on filter paper prewetted with neutralizing solution for four minutes. After excess solution is removed by placing the filters on dry filter papers for one minute, the colony side of the filters is placed into Proteinase K solution, incubated at 37° C. for 40-50 minutes. The filters are placed on dry filter papers to dry overnight. DNA is then cross-linked to nylon membrane by UV light treatment.

[0313] Colony hybridization is conducted as described by Sambrook, J., Fritsch, E. F. and Maniatis, T., (in Molecular Cloning: A laboratory Manual, 2^{nd} Edition). The following probes can be used in colony hybridization:

[0314] 1. First strand cDNA from the same tissue as the library was made from to remove the most redundant clones.

[0315] 2. 48-192 most redundant cDNA clones from the same library based on previous sequencing data.

[0316] 3. 192 most redundant cDNA clones in the entire maize sequence database.

[0317] 4. A Sal-A20 oligo nucleotide: TCG ACC CAC GCG TCC GAA AAA AAA AAA AAA AAA AAA, removes clones containing a poly A tail but no cDNA.

[0318] 5. cDNA clones derived from rRNA.

[0319] The image of the autoradiography is scanned into computer and the signal intensity and cold colony addresses of each colony is analyzed. Re-arraying of cold-colonies from 384 well plates to 96 well plates is conducted using Q-bot.

### EXAMPLE 4

[0320] This example describes identification of the gene from a computer homology search.

[0321] Gene identities can be determined by conducting BLAST (Basic Local Alignment Search Tool; Altschul, S. F., et al., (1993) J. Mol. Biol. 215:403-410; see also www.ncbi.nlm.nih.gov/BLAST/) searches under default parameters for similarity to sequences contained in the BLAST “nr” database (comprising all non-redundant GenBank CDS translations, sequences derived from the 3-dimensional structure Brookhaven Protein Data Bank, the last major release of the SWISS-PROT protein sequence database, EMBL, and DDBJ databases). The cDNA sequences are analyzed for similarity to all publicly available DNA sequences contained in the “nr” database using the BLASTN algorithm. The DNA sequences are translated in all reading frames and compared for similarity to all publicly available protein sequences contained in the “nr” database using the BLASTX algorithm (Gish, W. and States, D. J. Nature Genetics 3:266-272 (1993)) provided by the NCBI. In some cases, the sequencing data from two or more clones containing overlapping segments of DNA are used to construct contiguous DNA sequences.

[0322] Sequence alignments and percent identity calculations can be performed using the Megalign program of the LASERGENE bioinformatics computing suite (DNASTAR Inc., Madison, Wis.). Multiple alignment of the sequences can be performed using the Clustal method of alignment (Higgins and Sharp (1989) CABIOS. 5:151-153) with the default parameters (GAP PENALTY=10, GAP LENGTH PENALTY=10). Default parameters for pairwise alignments using the Clustal method are KTUPLE 1, GAP PENALTY=3, WINDOW=5 and DIAGONALS SAVED=5.

### EXAMPLE 5

[0323] This example describes expression of transgenes in monocot cells.

[0324] A transgene comprising a cDNA encoding the instant polypeptides in sense orientation with respect to the maize 27 kD zein promoter that is located 5′ to the cDNA fragment, and the 10 kD zein 3′ end that is located 3′ to the cDNA fragment, can be constructed. The cDNA fragment of this gene may be generated by polymerase chain reaction (PCR) of the cDNA clone using appropriate oligonucleotide primers. Cloning sites (NcoI or SmaI) can be incorporated into the oligonucleotides to provide proper orientation of the DNA fragment when inserted into the digested vector pML 103 as described below. Amplification is then performed in a standard PCR. The amplified DNA is then digested with restriction enzymes NcoI and SmaI and fractionated on an agarose gel. The appropriate band can be isolated from the gel and combined with a 4.9 kb NcoI-SmaI fragment of the plasmid pML 103. Plasmid pML 103 has been deposited under the terms of the Budapest Treaty at ATCC (American Type Culture Collection, 10801 University Blvd., Manassas, Va. 20110-2209), and bears accession number ATCC 97366. The DNA segment from pML 103 contains a 1.05 kb SalI-NcoI promoter fragment of the maize 27 kD zein gene and a 0.96 kb SmaI-SalI fragment from the 3′ end of the maize 10 kD zein gene in the vector pGem9Zf(+) (Promega). Vector and insert DNA can be ligated at 15° C. overnight, essentially as described (Maniatis). The ligated DNA may then be used to transform E. coli XL 1-Blue (Epicurian Coli XL-1 Blue; Stratagene). Bacterial transformants can be screened by restriction enzyme digestion of plasmid DNA and limited nucleotide sequence analysis using the dideoxy chain termination method (Sequenase DNA Sequencing Kit; U.S. Biochemical). The resulting plasmid construct would comprise a transgene encoding, in the 5′ to 3′ direction, the maize 27 kD zein promoter, a cDNA fragment encoding the instant polypeptides, and the 10 kD zein 3′ region.

[0325] The transgene described above can then be introduced into corn cells by the following procedure. Immature corn embryos can be dissected from developing caryopses derived from crosses of the inbred corn lines H99 and LH132. The embryos are isolated 10 to 11 days after pollination when they are 1.0 to 1.5 mm long. The embryos are then placed with the axis-side facing down and in contact with agarose-solidified N6 medium (Chu et al. (1975) Sci. Sin. Peking 18:659-668). The embryos are kept in the dark at 27° C. Friable embryogenic callus consisting of undifferentiated masses of cells with somatic proembryoids and embryoids borne on suspensor structures proliferates from the scutellum of these immature embryos. The embryogenic callus isolated from the primary explant can be cultured on N6 medium and sub-cultured on this medium every 2 to 3 weeks.

[0326] The plasmid, p35S/Ac (Hoechst Ag, Frankfurt, Germany) or equivalent may be used in transformation experiments in order to provide for a selectable marker. This plasmid contains the Pat gene (see European Patent Publication 0 242 236) which encodes phosphinothricin acetyl transferase (PAT). The enzyme PAT confers resistance to herbicidal glutamine synthetase inhibitors such as phosphinothricin. The pat gene in p35S/Ac is under the control of the 35S promoter from Cauliflower Mosaic Virus (Odell et al. (1985) Nature 313:810-812) and the 3′ region of the nopaline synthase gene from the T-DNA of the Ti plasmid of Agrobacterium tumefaciens.

[0327] The particle bombardment method (Klein et al. (1987) Nature 327:70-73) may be used to transfer genes to the callus culture cells. According to this method, gold particles (1 μm in diameter) are coated with DNA using the following technique. Ten μg of plasmid DNAs are added to 50 μL of a suspension of gold particles (60 mg per mL). Calcium chloride (50 μL of a 2.5 M solution) and spermidine free base (20 μL of a 1.0 M solution) are added to the particles. The suspension is vortexed during the addition of these solutions. After 10 minutes, the tubes are briefly centrifuged (5 sec at 15,000 rpm) and the supernatant removed. The particles are resuspended in 200 μL of absolute ethanol, centrifuged again and the supernatant removed. The ethanol rinse is performed again and the particles resuspended in a final volume of 30 μL of ethanol. An aliquot (5 μL) of the DNA-coated gold particles can be placed in the center of a Kapton flying disc (Bio-Rad Labs). The particles are then accelerated into the corn tissue with a Biolistic PDS-1 000/He (Bio-Rad Instruments, Hercules Calif.), using a helium pressure of 1000 psi, a gap distance of 0.5 cm and a flying distance of 1.0 cm.

[0328] For bombardment, the embryogenic tissue is placed on filter paper over agarose-solidified N6 medium. The tissue is arranged as a thin lawn and covered a circular area of about 5 cm in diameter. The petri dish containing the tissue can be placed in the chamber of the PDS-1000/He approximately 8 cm from the stopping screen. The air in the chamber is then evacuated to a vacuum of 28 inches of Hg. The macrocarrier is accelerated with a helium shock wave using a rupture membrane that bursts when the He pressure in the shock tube reaches 1000 psi.

[0329] Seven days after bombardment the tissue can be transferred to N6 medium that contains gluphosinate (2 mg per liter) and lacks casein or proline. The tissue continues to grow slowly on this medium. After an additional 2 weeks the tissue can be transferred to fresh N6 medium containing gluphosinate. After 6 weeks, areas of about 1 cm in diameter of actively growing callus can be identified on some of the plates containing the glufosinate-supplemented medium. These calli may continue to grow when sub-cultured on the selective medium.

[0330] Plants can be regenerated from the transgenic callus by first transferring clusters of tissue to N6 medium supplemented with 0.2 mg per liter of 2,4-D. After two weeks the tissue can be transferred to regeneration medium (Fromm et al., (1990) Bio/Technology 8:833-839).

### EXAMPLE 6

[0331] This example describes expression of transgenes in dicot cells.

[0332] A seed-specific expression cassette composed of the promoter and transcription terminator from the gene encoding the β subunit of the seed storage protein phaseolin from the bean Phaseolus vulgaris (Doyle et al., (1986) J. Biol. Chem. 261:9228-9238) can be used for expression of the instant polypeptides in transformed soybean. The phaseolin cassette includes about 500 nucleotides upstream (5′) from the translation initiation codon and about 1650 nucleotides downstream (3′) from the translation stop codon of phaseolin. Between the 5′ and 3′ regions are the unique restriction endonuclease sites Nco I (which includes the ATG translation initiation codon), SmaI, KpnI and XbaI. The entire cassette is flanked by Hind III sites.

[0333] The cDNA fragment of this gene may be generated by polymerase chain reaction (PCR) of the cDNA clone using appropriate oligonucleotide primers. Cloning sites can be incorporated into the oligonucleotides to provide proper orientation of the DNA fragment when inserted into the expression vector. Amplification is then performed as described above, and the isolated fragment is inserted into a pUC 18 vector carrying the seed expression cassette.

[0334] Soybean embroys may then be transformed with the expression vector comprising sequences encoding the instant polypeptides. To induce somatic embryos, cotyledons, 3-5 mm in length dissected from surface sterilized, immature seeds of the soybean cultivar A2872, can be cultured in the light or dark at 26° C. on an appropriate agar medium for 6-10 weeks. Somatic embryos which produce secondary embryos are then excised and placed into a suitable liquid medium. After repeated selection for clusters of somatic embryos which multiplied as early, globular staged embryos, the suspensions are maintained as described below.

[0335] Soybean embryogenic suspension cultures can maintained in 35 mL liquid media on a rotary shaker, 150 rpm, at 26° C. with florescent lights on a 16:8 hour day/night schedule. Cultures are subcultured every two weeks by inoculating approximately 35 mg of tissue into 35 mL of liquid medium.

[0336] Soybean embryogenic suspension cultures may then be transformed by the method of particle gun bombardment (Klein et al., (1987) Nature (London) 327:70-73, U.S. Pat. No. 4,945,050). A DuPont Biolistic PDS1000/HE instrument (helium retrofit) can be used for these transformations.

[0337] A selectable marker gene which can be used to facilitate soybean transformation is a transgene composed of the 35S promoter from Cauliflower Mosaic Virus (Odell et al., (1985) Nature 313:810-812), the hygromycin phosphotransferase gene from plasmid pJR225 (from E. coli; Gritz et al., (1983) Gene 25:179-188) and the 3′ region of the nopaline synthase gene from the T-DNA of the Ti plasmid of Agrobacterium tumefaciens. The seed expression cassette comprising the phaseolin 5′ region, the fragment encoding the instant polypeptides and the phaseolin 3′ region can be isolated as a restriction fragment. This fragment can then be inserted into a unique restriction site of the vector carrying the marker gene.

[0338] To 50 μL of a 60 mg/mL 1 m gold particle suspension is added (in order): 5 μL DNA (1 μg/μL), 20 μl spermidine (0.1 M), and 50 μL CaCl₂ (2.5 M). The particle preparation is then agitated for three minutes, spun in a microfuge for 10 seconds and the supernatant removed. The DNA-coated particles are then washed once in 400 μL 70% ethanol and resuspended in 40 μL of anhydrous ethanol. The DNA/particle suspension can be sonicated three times for one second each. Five microliters of the DNA-coated gold particles are then loaded on each macro carrier disk.

[0339] Approximately 300-400 mg of a two-week-old suspension culture is placed in an empty 60×15 mm petri dish and the residual liquid removed from the tissue with a pipette. For each transformation experiment, approximately 5-10 plates of tissue are normally bombarded. Membrane rupture pressure is set at 1100 psi and the chamber is evacuated to a vacuum of 28 inches mercury. The tissue is placed approximately 3.5 inches away from the retaining screen and bombarded three times. Following bombardment, the tissue can be divided in half and placed back into liquid and cultured as described above.

[0340] Five to seven days post bombardment, the liquid media may be exchanged with fresh media, and eleven to twelve days post bombardment with fresh media containing 50 mg/mL hygromycin. This selective media can be refreshed weekly. Seven to eight weeks post bombardment, green, transformed tissue may be observed growing from untransformed, necrotic embryogenic clusters. Isolated green tissue is removed and inoculated into individual flasks to generate new, clonally propagated, transformed embryogenic suspension cultures. Each new line may be treated as an independent transformation event. These suspensions can then be subcultured and maintained as clusters of immature embryos or regenerated into whole plants by maturation and germination of individual somatic embryos.

### EXAMPLE 7

[0341] This example describes expression of a transgene in microbial cells.

[0342] The cDNAs encoding the instant polypeptides can be inserted into the T7 E. coli expression vector pBT430. This vector is a derivative of pET-3a (Rosenberg et al. (1987) Gene 56:125-135) which employs the bacteriophage T7 RNA polymerase/T7 promoter system. Plasmid pBT430 was constructed by first destroying the EcoR I and Hind III sites in pET-3a at their original positions. An oligonucleotide adaptor containing EcoR I and Hind III sites was inserted at the BamH I site of pET-3a. This created pET-3aM with additional unique cloning sites for insertion of genes into the expression vector. Then, the Nde I site at the position of translation initiation was converted to an Nco I site using oligonucleotide-directed mutagenesis. The DNA sequence of pET-3aM in this region, 5′-CATATGG, was converted to 5′-CCCATGG in pBT430.

[0343] Plasmid DNA containing a cDNA may be appropriately digested to release a nucleic acid fragment encoding the protein. This fragment may then be purified on a 1% NuSieve GTG low melting agarose gel (FMC). Buffer and agarose contain 10 μg/ml ethidium bromide for visualization of the DNA fragment. The fragment can then be purified from the agarose gel by digestion with GELase (Epicentre Technologies) according to the manufacturer's instructions, ethanol precipitated, dried and resuspended in 20 μL of water. Appropriate oligonucleotide adapters may be ligated to the fragment using T4 DNA ligase (New England Biolabs, Beverly, Mass.). The fragment containing the ligated adapters can be purified from the excess adapters using low melting agarose as described above. The vector pBT430 is digested, dephosphorylated with alkaline phosphatase (NEB) and deproteinized with phenol/chloroform as described above. The prepared vector pBT430 and fragment can then be ligated at 16° C. for 15 hours followed by transformation into DH5 electrocompetent cells (GIBCO BRL). Transformants can be selected on agar plates containing LB media and 100 μg/mL ampicillin. Transformants containing the gene encoding the instant polypeptides are then screened for the correct orientation with respect to the T7 promoter by restriction enzyme analysis.

[0344] For high level expression, a plasmid clone with the cDNA insert in the correct orientation relative to the T7 promoter can be transformed into E. coli strain BL2 1 (DE3) (Studier et al. (1986) J. Mol. Biol. 189:113-130). Cultures are grown in LB medium containing ampicillin (100 mg/L) at 25° C. At an optical density at 600 nm of approximately 1, IPTG (isopropylthio-β-galactoside, the inducer) can be added to a final concentration of 0.4 mM and incubation can be continued for 3 h at 25°. Cells are then harvested by centrifugation and re-suspended in 50 μL of 50 mM Tris-HCl at pH 8.0 containing 0.1 mM DTT and 0.2 mM phenyl methylsulfonyl fluoride. A small amount of 1 mm glass beads can be added and the mixture sonicated 3 times for about 5 seconds each time with a microprobe sonicator. The mixture is centrifuged and the protein concentration of the supernatant determined. One microgram of protein from the soluble fraction of the culture can be separated by SDS-polyacrylamide gel electrophoresis. Gels can be observed for protein bands migrating at the expected molecular weight.

[0345] The above examples are provided to illustrate the invention but not to limit its scope. Other variants of the invention will be readily apparent to one of ordinary skill in the art and are encompassed by the appended claims. All publications, patents, patent applications, and computer programs cited herein are hereby incorporated by reference.

The application's sequence listing, which the Patent Office published only in electronic form, follows.

SEQUENCE LISTING (375 sequences)

SEQ ID NO: 1 - DNA, 665 bp, Oryza sativa
  unsure (41)
  unsure (44)
  unsure (502)
  unsure (522)
  unsure (597)
gttctaactcggagccggcggcgagggcggtggcggaggangtngccccggtggggagggatgaggcagacgggggtgacgctgcggtacatgatggagttcggggcgcgccccacggagaggaacctgctgcggtcggcgcagttcctgcgcagggagctccccatccgcatcgcccgccgcgcgctcgacctcgactccctccccttcggcctctccaccaagcccgccatcctcaaggtgagagattggtatttggactcattccgcgacttacggtgcttcccggaggtgaggaaccgggatgatgagcttgcattcaccgagatgatcaagatgattcgagtgcggcacaacaatgtggtgcccaccatggcgttgggtgtgcggcagctgaagaaagacctgggtggcacaaaggcctttccccctggcattgatgagatccatcagttcctcgaccgcttctacatgtcaaggattgggatccgcatgctgatanggaacatttctttgcatganctgatcagaactggtgttattggactcataacaaaagatatcccatgctggtggccacatcactgaagatcacgncattgcataaggaatatgatagccctgattaaatatatgagaccaattcaattcatagtaacactcta

SEQ ID NO: 2 - protein, 166 aa, Oryza sativa
  UNSURE (13)
SNSEPAARAVAEXVARWGGMRQTGVTLRYMMEFGARPTERNLLRSAQFLRRELPIRIARRALDLDSLPFGLSTKPAILKVRDWYLDSFRDLRCFPEVRNRDDELAFTEMIKMIRVRHNNVVPTMALGVRQLKKDLGGTKAFPPGIDEIHQFLDRFYMSRIGIRMLI

SEQ ID NO: 3 - DNA, 1407 bp, Oryza sativa
gcacgaggttctaactcggagccggcggcgagggcggtggcggaggaggtggcgcggtggggagggatgaggcagacgggggtgacgctgcggtacatgatggagttcggggcgcgccccacggagaggaacctgctgcggtcggcgcagttcctgcgcagggagctccccatccgcatcgcccgccgcgcgctcgacctcgactccctccccttcggcctctccaccaagcccgccatcctcaaggtgagagattggtatttggactcattccgcgacttacggtgcttcccggaggtgaggaaccgggatgatgagcttgcattcaccgagatgatcaagatgattcgagtgcggcacaacaatgtggtgcccaccatggcgttgggtgtgcggcagctgaagaaagacctgggtggcacaaaggcctttccccctggcattgatgagatccatcagttcctcgaccgcttctacatgtcaaggattgggatccgcatgctgatagggcagcatgttgctttgcatgagcctgatccagaacctggtgttattggactcataagcaaaagattatcccccatgctggtggctcaacatgctactgaagatgcacgtgctatttgcatgagggaatatggatcagcccctgatgtgaacatatatggagacccagatttcacatttccatatgttaaactacatctacaactgatgatgtttgaattggtgaagaattccctccgtgcagtacaggaacgatatatgaactctgataagcatgcgcctcctgttagaatcatagtcgctgatggagcagaggacgtaacaatcaagattagtgatgaaggtggtggaatacccagaagtggtctctcgagaattttcacatatctctacagcacagcagaaaacccacctgatctggatggccgtaacgaaggagtgaccatggccgggtacggctatgggatcccgattagccgtctttatgctcgatattttggcggggacctgcagatcatttctatggaaggatatggaaccgatgcttacctccacctatcacggctaggagattcggaggagcccttgcattaggagatctggaggaggaaaccctttgcctcagttctgataccactgctgtaattaggatgctattgcttttaccattgctgtgctggtatgcaaatacatagttcccaaggccagccagctctatgtgcttccagtttgctggagcgtgatcataattcagatttcagaatcccctctggttcacattgccattagaactcgttatccctcgccctcggtggctgcctgaaaaatgtgatgtacagttgtccgttttcggagttctgcatggggagtatcttttttttcaaaaaaaaaaaaaaaaaa

SEQ ID NO: 4 - protein, 364 aa, Oryza sativa
GSNSEPAARAVAEEVARWGGMRQTGVTLRYMMEFGARPTERNLLRSAQFLRRELPIRIARRALDLDSLPFGLSTKPAILKVRDWYLDSFRDLRCFPEVRNRDDELAFTEMIKMIRVRHNNVVPTMALGVRQLKKDLGGTKAFPPGIDEIHQFLDRFYMSRIGIRMLIGQHVALHEPDPEPGVIGLISKRLSPMLVAQHATEDARAICMREYGSAPDVNIYGDPDFTFPYVKLHLQLMMFELVKNSLRAVQERYMNSDKHAPPVRIIVADGAEDVTIKISDEGGGIPRSGLSRIFTYLYSTAENPPDLDGRNEGVTMAGYGYGIPISRLYARYFGGDLQIISMEGYGTDAYLHLSRLGDSEEPLH

SEQ ID NO: 5 - DNA, 503 bp, Oryza sativa
  unsure (496)
  unsure (502)
gcaggttagtgatgaaggtggtggaataccaaggagcggccttccaagaattttcacatatctatatagcactgcaaagaatccacctgatatggattgccctagtgaaggagtaactatggctggatatggctatggtcttccaatcagtcgcctgtatgctcgatattttggtggtgacctgcaaatcatctctatggaaggatacggcaccgatgcttacctgcacttgtcacggttgggagattcggaggagcccttgccttgaaggcttccctgtcctgataccatctctgtaattaattaggttgctcttgtctcttgtaattcctgggctggtttggaatattgttttcaagtgccagccacctatagctgttaaccttctacagtagttgccacggtttcatcacttcagctttgcaacagcatgagcacaagtctcctctctctctttctctctctctctactccgccttgtaacgaaatgtagaantcctcng

SEQ ID NO: 6 - protein, 88 aa, Oryza sativa
QVSDEGGGIPRSGLPRIFTYLYSTAKNPPDMDCPSEGVTMAGYGYGLPISRLYARYFGGDLQIISMEGYGTDAYLHLSRLGDSEEPLP

SEQ ID NO: 7 - DNA, 616 bp, Oryza sativa
  unsure (442)
  unsure (470)
  unsure (611)
gcagacgggggtgagcctgcgctacatgatggagttcgggtcgcgccccacggagcggaacctgctgctctccgcgcagttcctgcagaaggagctcccaatccggatcgcgcgccgcgcgctcgagctcgagtccctccccttcggcctctcccgcaagcccgccatcctcaaggtgcgggattggtacttggactctttccgcgacatcagatactttccagaagtgaggaataggaacgacgagctcgcttttacgcagatgatcaagatgatcaaagtacgccacaataatgtggttccaacgatggcactgggagttcaacagctcaagaacgagcagtatcgcacaaggaagatccccactgcatttgacgagatccacgagtttcttgacagattctacatgtcaaggattgggatccgcatgcttatagggcancatgtggctttgcatgatcctgacccangagcctggcgtcataggcctcattaatacagaattgtcccctatacaggtggctcaagctgccagtgaaagatgcccgttctatttgttttgagggaatatggatcagctcctggagattgacatcttatggagacccaanctttt

SEQ ID NO: 8 - protein, 193 aa, Oryza sativa
  UNSURE (147)
QTGVSLRYMMEFGSRPTERNLLLSAQFLQKELPIRIARRALELESLPFGLSRKPAILKVRDWYLDSFRDIRYFPEVRNRNDELAFTQMIKMIKVRHNNVVPTMALGVQQLKNEQYRTRKIPTAFDEIHEFLDRFYMSRIGIRMLIGXHVALHDPDPEPGVIGLINTELSPIQVAQAASEDARLFVLREYGSAP

SEQ ID NO: 9 - DNA, 1481 bp, Oryza sativa
ccaaatctcgccgccggtgaaggaggtagaagtggaggtggaggtggggggaggatggcgtcggagccggtggcgagggcggtggcggaggaggtggggaggtgggggagcatgaagcagacgggggtgagcctgcgctacatgatggagttcgggtcgcgccccacggagcggaacctgctgctctccgcgcagttcctgcagaaggagctcccaatccggatcgcgcgccgcgcgctcgagctcgagtccctccccttcggcctctcccgcaagcccgccatcctcaaggtgcgggattggtacttggactctttccgcgacatcagatactttccagaagtgaggaataggaacgacgagctcgcttttacgcagatgatcaagatgatcaaagtacgccacaataatgtggttccaacgatggcactgggagttcaacagctcaagaacgagcagtatcgcacaaggaagatccccactgcatttgacgagatccacgagtttcttgacagattctacatgtcaaggattgggatccgcatgcttatagggcagcatgtggctttgcatgatcctgacccagagcctggcgtcataggcctcattaatacagaattgtcccctatacaggtggctcaagctgccagtgaagatgcccgttctatttgtttgagggaatatggatcagctcctgagattgacatctatggagacccaacttttacatttccatatgtttcatcacatctacatctcatgctatttgaattggtgaagaactccttgcgtgcagtacaggaacgatatatgaattccgataaagatgttcctccagttagaattatcgttgctgatggggcagaggatgtaactatcaaggttagtgatgaaggtggtggaataccaaggagcggccttccaagaattttcacatatctatatagcactgcaaagaatccacctgatatggattgccctagtgaaggagtaactatggctggatatggctatggtcttccaatcagtcgcctgtatgctcgatattttggtggtgacctgcaaatcatctctatggaaggatacggcaccgatgcttacctgcacttgtcacggttgggagattcggaggagcccttgccttgaaggcttccctgtcctgataccatctctgtaattaattaggttgctcttgtctcttgtaattcctgggctggtttggaatattgttttcaagtgccagccacctatagctgttaaccttctacagtagttgccacggtttcatcacttcagctttgcagcagcatgagcacaagtctcctctctctctttctctctctctctactctgccttgtagcgaaatgtagaattcttctgccacgcacatggcattgttcatacttctcgtacttgttgagcttcatggcttggtgcagattgtactttgatagttatcagtagtaagctaacttcatca

SEQ ID NO: 10 - protein, 363 aa, Oryza sativa
MASEPVARAVAEEVGRWGSMKQTGVSLRYMMEFGSRPTERNLLLSAQFLQKELPIRIARRALELESLPFGLSRKPAILKVRDWYLDSFRDIRYFPEVRNRNDELAFTQMIKMIKVRHNNVVPTMALGVQQLKNEQYRTRKIPTAFDEIHEFLDRFYMSRIGIRMLIGQHVALHDPDPEPGVIGLINTELSPIQVAQAASEDARSICLREYGSAPEIDIYGDPTFTFPYVSSHLHLMLFELVKNSLRAVQERYMNSDKDVPPVRIIVADGAEDVTIKVSDEGGGIPRSGLPRIFTYLYSTAKNPPDMDCPSEGVTMAGYGYGLPISRLYARYFGGDLQIISMEGYGTDAYLHLSRLGDSEEPLP

SEQ ID NO: 11 - DNA, 503 bp, Glycine max
gttgcatgctggtgttggtgttggtgtcccaattcactctcaaatttcagggttcttaagaactactaggaccttgccaccaccatggctgccaaaaaggcatgtgagacattctcaaagtcattgattgaggaagtgaatagatggggttgcttgaagcagacaggggtgagtctcaggtacatgatggaattcgggtccaaacccactaacaagaatttgctgatctctgcccagtttcttcacaaggaacttgccatcagaattgccagaagggccgttgaacttgagaatcttccctatggtttgtctcaaaaacctgctgttctgaaggttagggattggtatgtggattctttccgtgatgtcagagccttccctgacatcaagaatgtgaatgatgaaagagagttcactgaaatgattaagggcatcaaagtgaggcacaacaatgtggtacccacaatgggcatggggagttcagcaattgaagaaaggatggg

SEQ ID NO: 12 - protein, 139 aa, Glycine max
MAAKKACETFSKSLIEEVNRWGCLKQTGVSLRYMMEFGSKPTNKNLLISAQFLHKELAIRIARRAVELENLPYGLSQKPAVLKVRDWYVDSFRDVRAFPDIKNVNDEREFTEMIKGIKVRHNNVVPTMGMGSSAIEERM

SEQ ID NO: 13 - DNA, 1382 bp, Glycine max
gcacgaggttgcatgctggtgttggtgttggtgtcccaattcactctcaaatttcagggttcttagaactactaggaccttgccaccaccatggctgccaaaaaggcatgtgagacattctcaaagtcattgattgaggaagtgaatagatggggttgcttgaagcagacaggggtgagtctcaggtacatgatggaattcgggtccaaacccactaacaagaatttgctgatctctgcccagtttcttcacaaggaacttgccatcagaattgccagaagggccgttgaacttgagaatcttccctatggtttgtctcaaaaacctgctgttctgaaggttagggattggtatgtggattctttccgtgatgtcagagccttccctgacatcaagaatgtgaatgatgaaagagagttcactgaaatgattaaggccatcaaagtgaggcacaacaatgtggtacccacaatggccatgggagttcagcaattgaagaaaggtatggatccaaagattgtttatgaagatcttgttgagattcatcagttccttgaccgcttctacatgtcaagaattggaatccgtatgcttatcgggcagcatgttgagttgcacaatcccaatcctcctccccacgtcgtgggttacatacacacgaaaatgtctcctgtggaggtggcgaggaatgccagtgaagatgcacgttctatatgttgtcgtgaatatggaagtgcccctgatgtccatatttatggagatcctaattttacttttccgtatgttccagctcacttgcatcttatggtatttgagttggttaagaactcactgcgtgctgtacaagagcgttttatgaattccgataaagttgcacctcccattagaataatagttgctgatggaatagaggatgttaccataaaggtctcagatgagggaggtggaattgcaagaagtggtttgcctaaaatttttacatatctatatagtactgccagaaacccattggatgagcattcggatcttggaataggtgataatgtgacaatggctggatatggatatggtcttcctattagtcgtctatatgctcggtattttggaggtgatcttcaaataatctctatggaaggatatggcactgatgcatatctccatttgtctcgtttgggagattcacaagaacctttgccttgaaagtacttttcagtcagttaccgtaagtaactcagtaacattgtgctagggaaaacaccattgctagcataaaaaacaaaaagtactatttgctgtcaattttttacattctaataatttgacagatttcctgtaaatatgtggtacaaaagattgtgcaaaaaaaaaaaaaaaaaaaaaaa

SEQ ID NO: 14 - protein, 369 aa, Glycine max
MAAKKACETFSKSLIEEVNRWGCLKQTGVSLRYMMEFGSKPTNKNLLISAQFLHKELAIRIARRAVELENLPYGLSQKPAVLKVRDWYVDSFRDVRAFPDIKNVNDEREFTEMIKAIKVRHNNVVPTMAMGVQQLKKGMDPKIVYEDLVEIHQFLDRFYMSRIGIRMLIGQHVELHNPNPPPHVVGYIHTKMSPVEVARNASEDARSICCREYGSAPDVHIYGDPNFTFPYVPAHLHLMVFELVKNSLRAVQERFMNSDKVAPPIRIIVADGIEDVTIKVSDEGGGIARSGLPKIFTYLYSTARNPLDEHSDLGIGDNVTMAGYGYGLPISRLYARYFGGDLQIISMEGYGTDAYLHLSRLGDSQEPLP

SEQ ID NO: 15 - DNA, 543 bp, Glycine max
  unsure (346)
  unsure (422)
  unsure (522)
aggtctcagatgagggaggtggaattgcaagaagtgggttgcctaaaatttttacatatctatatagtactgcgagaaacccattggatgagcattcggatcttggaataggtgataatgtgacaatggctggatatggatatggtcttcctattagtcgtctatatgctcggtattttggaggtgatcttcaaataatctctatggaaggatatggtgagtaggctattacttgttttccccttcatttacaacatttttctgatagatatccttccactttttgtaattctacctactttagcacttaaagagttacaactctttgtatatcttctccatttanaatttagggatttggagatatgggacctaattgcaccttgatatcatgaaactggtgtcaaacttaatttcctggntacaattcaaggccctgaagatcgattttggaccttcacaataaatggttaacggccttcaattggggtaacaaagtgaataataataatttcccccaanggtgtaaaggggtgtttggtc

SEQ ID NO: 16 - protein, 73 aa, Glycine max
VSDEGGGIARSGLPKIFTYLYSTARNPLDEHSDLGIGDNVTMAGYGYGLPISRLYARYFGGDLQIISMEGYGE

SEQ ID NO: 17 - DNA, 546 bp, Glycine max
  unsure (8)
  unsure (24)
  unsure (37)
  unsure (44)
  unsure (53)
tggattantagtttcttgatggantaggaggatgttnccataanggtctcagntgagggagttggaattgcaggaagtgggttgcctaaaatttttacatatctatatagtactgcgagaaacccattggatgagcattcggatcttggaataggtgataatgtgacaatggctggatatggatatggtcttcctattagtcgtctatatgctcggtattttggaggtgatcttcaaataatctctatggaaggatatggcactgatgcatatctccatttgtctcgtttgggagattcacaagaacctttgccctgaaagtacttttcagtcagagttaccttaagtaactcactaacattgtgctaaggaaaacacttgttagaataaaaaagtactatttgctgtcaatttttacattctaataatttgacagatttcctgtaaatatgtggtacataagattgtgcatggtgatgccccccttctttgccttcagatccagctttgggaatttgtcctttttatcttctgaaaaaaaaaaaa

SEQ ID NO: 18 - protein, 96 aa, Glycine max
  UNSURE (4)
  UNSURE (6)
  UNSURE (9)
EDVXIXVSXEGVGIAGSGLPKIFTYLYSTARNPLDEHSDLGIGDNVTMAGYGYGLPISRLYARYFGGDLQIISMEGYGTDAYLHLSRLGDSQEPLP

SEQ ID NO: 19 - DNA, 529 bp, Glycine max
  unsure (515)
  unsure (527)
gttaggtctcagatgagggaggtggaataccaaggagtggtcttccaaaaatatttacatatctctacagtacagccagaaatgcatcgtgggatgaaaatgaaccttctgatcttggaacaaccgataatataagtgtaaaaatggctggaaatggttatggacttcctatttgccgcttgtatgctaggtattttggtggcgatcttcaagtaatctctatggaaggatatggtgttggctaatggtactgtgttgtttgagatttaatggagtttgaagaagatggagaagggggttcaaaaatttgtgataatccaaaaattatttctaagtttaaatgaaaaatcttaagttcagatttacctaaacctacattaaaaaaaatgacaaatttaaattttgtaagaagaaaaattagatacaatatattacagaaacagatttcaaatattttgatatttatatggatgaaaaacttaatttaatgattttttttaagaaaggtggttccnttgggaggaaanga

SEQ ID NO: 20 - protein, 77 aa, Glycine max
VSDEGGGIPRSGLPKIFTYLYSTARNASWDENEPSDLGTTDNISVKMAGNGYGLPICRLYARYFGGDLQVISMEGYG

SEQ ID NO: 21 - DNA, 1114 bp, Triticum aestivum
  unsure (794)
  unsure (943)
  unsure (948)
  unsure (958)
  unsure (999)
  unsure (1003)..(1004)
  unsure (1037)
  unsure (1073)
  unsure (1085)
  unsure (1093)
  unsure (1100)
  unsure (1104)
cttctctcccccctgatgccgccttaattagccgcctgccccccctaatcctcctgtttgcacggcggttacccggctccgcgtcggcgagcggtggcggcggcgggcggcggagggatgatggcgtcggagccggtggcgcgggccgtggcggaggaggtggggcggtggggcagcatgaagcagacgggggtgagcctgcggtacatgatggagttcgggtccgtccccacggaccgcaacctgctgctctccgcgcagttcctgcacaaggagctccccatccgcatcgcccgccgcgcgctcgagctcgagtctcttcccttcggcctctccgccaagcccgccatcctcaaggtgagggactggtacttggactcgttccgcgacatccggtattttccagaagtgaggaatcgggacgacgagcttgctttcacacagatgattaagatgatcaaagtgcggcacaataacgtggtaccgactatggtcttgggagtgcaacagctgaaaaacgaacagttcagctcaaggaagcttcccccaggattcgacgagatccacgggttcctcgatcgattttacatgtcaaggattggtattcgcatgctcatagggcagcatgtggctctgcatgaacctgaaccacagcctggcgtcataggcctcatcaatacaaaattgtcccccatacaggtagctcaaattgctagtgaggatgcccgttccatttgtatgagggaatacggatcagctcctgacatcaacatttatggaggatcaaaatttancatttccatatgtcacatcgcatcttcatctcatgctgtttgaactggtgaaaaattcccttcgtgcagtacaggaaagatatatgaattctgataaagatgttcctcctggcagaattatagttgctgatggacaataggatgttacnattanggcagtgatnaaggcggtggatacggggaatggctccctagatttcaatancttnnagacgcaaggatctactgatatgggggcctaanaaggatggctaggtggtatggtttggcctcaattancccttaccgganatccgggnggctaantaanccatggggat

SEQ ID NO: 22 - protein, 290 aa, Triticum aestivum
  UNSURE (272)
MMASEPVARAVAEEVGRWGSMKQTGVSLRYMMEFGSVPTDRNLLLSAQFLHKELPIRIARRALELESLPFGLSAKPAILKVRDWYLDSFRDIRYFPEVRNRDDELAFTQMIKMIKVRHNNVVPTMVLGVQQLKNEQFSSRKLPPGFDEIHGFLDRFYMSRIGIRMLIGQHVALHEPEPQPGVIGLINTKLSPIQVAQIASEDARSICMREYGSAPDINIYGDQNLTFPYVTSHLHLMLFELVKNSLRAVQERYMNSDKDVPPGRIIVADGQXDVTIKVSDEGGGIRGMAP

SEQ ID NO: 23 - DNA, 1424 bp, Triticum aestivum
gcacgagcttctctcccccctgatgccgccttaattagccgcctgccccccctaatcctcctgtttgcacggcggttacccggctccgcgtcggcgagcggtggcggcggcgggcggcggagggatgatggcgtcggagccggtggcgcgggccgtggcggaggaggtggggcggtggggcagcatgaagcagacgggggtgagcctgcggtacatgatggagttcgggtccgtccccacggaccgcaacctgctgctctcggcccagttcctgcaaaaggagctccccatccgcatcgcccgccgcgcgctcgagctcgagtccctccccttcggcctctccgccaagcccgccatcctcaaggtgagggactggtacttggactcgttccgcgacatccgatatttcccagaagtgaggaatcgggacgacgagcttgctttcacgcagatgattaagatgatcaaagtgcggcacaataacgtggtaccgactatggctttgggagtgcaacagctgaaaaacgaacagttcagctcaaggaagcttcccccaggattcgacgagatccacgggttcctcgatcgattttacatgtcaaggattggtattcgcatgctcatagggcagcatgtggctctgcatgaacctgaaccacagcctggcgtcataggcctcatcaatacaaaattgtcccccatacaggtagctcaaattgctagtgaggatgcccgttccatttgtatgagggaatacggatcagctcctgacatcaacatttatggagatcaaaatttaacatttccatatgtcacatcgcatcttcatctcatgctgtttgaactggtgaaaaattcccttcgtgcagtacaggaaagatatatgaattctgataaagatgttcctcctgtcagaattatagttgctgatggaacagaggatgttactattaaggtcagtgatgaaggcggtggaatacggagaagtgggctccctagaattttcacatatctttacagcactgcaaagaatctacctgatatggagggccctagtgaaggagtgactatggctggatatggttttggacttccagttagtcgcctttatgcgcgatatttcggtggcgacctacaaatcatatccatggagggatacggcaccgacgcttacctccacttgtcacgactgggagactcggaggagccattgccttagtgaccccttctatcctgatacagtttctgtaattaggttgctcttgttatattgtaatccttgttctggtttgcaaatattgtttcaagggccagccatatatagctgttaaacctgtatcttctagctataattatctcattgtttctgcttttctgcctgtgttgcataatttggcaaaaaaaaaaaaaaaaaaaaaaaaaaa

SEQ ID NO: 24 - protein, 364 aa, Triticum aestivum
MMASEPVARAVAEEVGRWGSMKQTGVSLRYMMEFGSVPTDRNLLLSAQFLQKELPIRIARRALELESLPFGLSAKPAILKVRDWYLDSFRDIRYFPEVRNRDDELAFTQMIKMIKVRHNNVVPTMALGVQQLKNEQFSSRKLPPGFDEIHGFLDRFYMSRIGIRMLIGQHVALHEPEPQPGVIGLINTKLSPIQVAQIASEDARSICMREYGSAPDINIYGDQNLTFPYVTSHLHLMLFELVKNSLRAVQERYMNSDKDVPPVRIIVADGTEDVTIKVSDEGGGIRRSGLPRIFTYLYSTAKNLPDMEGPSEGVTMAGYGFGLPVSRLYARYFGGDLQIISMEGYGTDAYLHLSRLGDSEEPLP

SEQ ID NO: 25 - DNA, 523 bp, Zea mays
  unsure (433)
  unsure (458)
  unsure (496)
  unsure (502)
  unsure (516)
cacatgtgcatgttgtttacaggccaggctttcaggaagttgatactccaagaaggcgagaaatttgtccttgtgttatttgatactccatacaaccaggccgcatatggtattgtggataaactagggagtctggttgttaggatagttttcttgccatttgaagagagttcatatgccacttttgcccgattggcaggagagagtccccgaaatatatccaatattgaagactctttgcttggtgcgcttaagcttattatgctaataggtttggtgatcatttcatttggtccaagttattcatatacccttctaaaattactctatggggaaagacacagtgatggagaggctccaagttattcttcgttactattgtttatatatcatcaagtttagcaatgaatggcacatctgaaagcctttcttnaagccggttgcaaatgaaaaccaancttaagcaatcaaatgatatgttgcttcctgttccccngtgganttacaacaattccnaaatgtt

SEQ ID NO: 26 - protein, 115 aa, Zea mays
HMCMLFTGQAFRKLILQEGEKFVLVLFDTPYNQAAYGIVDKLGSLVVRIVFLPFEESSYATFARLAGESPRNISNIEDSLLGALKLIMLIGLVIISFGPSYSYTLLKLLYGERHS

SEQ ID NO: 27 - DNA, 1102 bp, Zea mays
cacatgtgcatgttgtttacaggccaggctttcaggaagttgatactccaagaaggcgagaaatttgtccttgtgttatttgatactccatacaaccaggccgcatatggtattgtggataaactagggagtctggttgttaggatagttttcttgccatttgaagagagttcatatgccacttttgcccgattggcaggagagagtccccgaaatatatccaatattgaagactctttgcttggtgcgcttaagcttattatgctaataggtttggtgatcatttcatttggtccaagttattcatatacccttctaaaattactctatggggaaagacacagtgatggagaggctccagttattcttcgttactattgtttatatatcatcagtttagcaatgaatggcacatctgaagcctttcttcatgctgttgcaaatgaaaaccagcttaagcagtcaaatgatatgttgcttctgttctcggtgatttacatcattctaaatgttgttcttattaaatcttctggagctgttgggttaattgctgctaatgccattaatatgttgcttcgaatatcatattctgcagtatttataaaagactatttcaagggctcattctctttccggcgctgtgtgcctgcgggctggggcattttactcatttctggtctgaccactgttttctctgagagggttttcttgaacaaaacgaggttcaagcagactgttcccattcacatagcgattggcatcatgtgcttgagcatcgcgttacttgagatataccgtggcgaaaagcagttcttgatgcaaataatcagaactttgaagcataatgacaaaagccagtgatttgaagacacagcgcatttcatagcgtattctctctggaacgcctgatgaaagagagctggtagtatagtgggtgggtaatttggtgtgtatgcaggagatcgggagttaacagaagaggggggattaatcggtcagatagataaatcggttgcgtatgggaattgctggatttcttgttgacccaatatttatattacaggtttattgagctagtgattcaataatttataattaaaaa

SEQ ID NO: 28 - protein, 286 aa, Zea mays
HMCMLFTGQAFRKLILQEGEKFVLVLFDTPYNQAAYGIVDKLGSLVVRIVFLPFEESSYATFARLAGESPRNISNIEDSLLGALKLIMLIGLVIISFGPSYSYTLLKLLYGERHSDGEAPVILRYYCLYIISLAMNGTSEAFLHAVANENQLKQSNDMLLLFSVIYIILNVVLIKSSGAVGLIAANAINMLLRISYSAVFIKDYFKGSFSFRRCVPAGWGILLISGLTTVFSERVFLNKTRFKQTVPIHIAIGIMCLSIALLEIYRGEKQFLMQIIRTLKHNDKSQ

SEQ ID NO: 29 - DNA, 547 bp, Oryza sativa
cttacacgttactattgtttctacgtcatatgcttagcaatgaatggcacatctgaagctttccttcatgctgttgcaaatgaagacaagcttaagcagtcaaatgatatgttgctcctgttctcggcaatttacattgtgctaaatgttgtcctgattaaatctgctggtgcagttgggttgattgctgcaaattccatcaatatgctgctgcgaatcacatattcagcggcattcattaaagactatttcaagggctcattctctttccgccactgcttgccggcaggctggggtgtgttgctcatttctggcctgaccacaagctttctctgaaaggatgtttctgaataagaaacaggttcaagcaaacccttcccattcacatggggataggcataatgtgcctgggtttctcaacactcgagatataccgtggtgaaaagcagttcttgacgagtataatcaagatcattgaagagccgcgacaaacttgcatgagtctaacaacattcaaggttttgccaagtggttttagcattcgcct

SEQ ID NO: 30 - protein, 111 aa, Oryza sativa
LTRYYCFYVICLAMNGTSEAFLHAVANEDKLKQSNDMLLLFSAIYIVLNVVLIKSAGAVGLIAANSINMLLRITYSAAFIKDYFKGSFSFRHCLPAGWGVLLISGLTTSFL

SEQ ID NO: 31 - DNA, 814 bp, Oryza sativa
gcacgagcttacacgttactattgtttctacgtcatatgcttagcaatgaatggcacatctgaagctttccttcatgctgttgcaaatgaagacaagcttaagcagtcaaatgatatgttgctcctgttctcggcaatttacattgtgctaaatgttgtcctgattaaatctgctggtgcagttgggttgattgctgcaaattccatcaatatgctgctgcgaatcacatattcagcggcattcattaaagactatttcaagggctcattctctttccgccactgcttgccggcaggctggggtgtgttgctcatttctggcctgaccacagctttctctgaaaggatgtttctgaatagaaacaggttcaagcagacccttcccattcacatggcgataggcataatgtgcctgggtttctcatcactcgagatataccgtggtgaaaagcagttcttgacgagtataatcagatcattgaagagccgcgacaaacttgcatgagtctaacaacattcagggttttgcgagtgtttttagcattcgcctgataaccgcattttcagaaagaaaacatatacgatgccgtaaatataattgtacattgcatgggttgacgacagaagataattatgccaagcggctggaggacttcactgaacatggatcaaactggtcgcgttctctactggagtcgggttaatggtgtgtgcagcagaacaactgttcactaaacggcaacagaaagcatagatcagtggcttatataggcaatttattatcttattctgtaaaaaaaaaaaaaaaaaaaaa

SEQ ID NO: 32 - protein, 165 aa, Oryza sativa
LTRYYCFYVICLAMNGTSEAFLHAVANEDKLKQSNDMLLLFSAIYIVLNVVLIKSAGAVGLIAANSINMLLRITYSAAFIKDYFKGSFSFRHCLPAGWGVLLISGLTTAFSERMFLNRNRFKQTLPIHMAIGIMCLGFSSLEIYRGEKQFLTSIIRSLKSRDKLA

SEQ ID NO: 33 - DNA, 708 bp, Helianthus tuberosus
  unsure (566)
  unsure (570)
  unsure (607)
  unsure (627)
  unsure (632)
  unsure (643)
  unsure (656)
  unsure (671)
  unsure (678)
  unsure (690)
  unsure (694)
  unsure (696)
aaagcttcagagcttcacattgacgatcacaaaagctcaaatctttcaaatgggtcttcctccccatgaagcaatcaaccagttcaaggagttaatggaccaagttgatgagcctcttaaaagaacattcaagaacgttcatcagggatatgtagtcgaaactttggagagatttcttaaagcaagagagggaaatgttacaaaagcccacaagatgttggtggatagcttacagtggaggctgcaaaatgggatagatgacattttagctaaaccgattattcctgctaatttctacagaggagttcgtgattcgcagctgataggactgtctggttacacaagagagggccttcccgtgtttgctatcggtgcaggcctcagcacattcgacaaagcatctatccattatatgtgcaatcacacattcaaataaatgaatatcgggatcgtgtgatactgccggctgcactaaaagaatggaaagtatatgggagtgtgtaaaggtttagatatagtggctaaacttcgcactgaccagttaactgcgaaacatctcacgtganattnagtccaggaaagttactttattataacgcccaatatncaactgttgagtttaacccntgagnaaaagtaaacnatttcaggggggntcacttaagaaggcnctccccnatttgcaaaagncggngncgttgcagggat

SEQ ID NO: 34 - protein, 144 aa, Helianthus tuberosus
  UNSURE (121)
MGLPPHEAINQFKELMDQVDEPLKRTFKNVHQGYVVETLERFLKAREGNVTKAHKMLVDSLQWRLQNGIDDILAKPIIPANFYRGVRDSQLIGLSGYTREGLPVFAIGAGLSTFDKASIHXYVQSHIQINEYRDRVILPAALKE

SEQ ID NO: 35 - DNA, 1334 bp, Helianthus tuberosus
gcacgagaaagcttcagagcttcacattgacgatcacaaaagctcaaatctttcaaatgggtcttcctccccatgaagcaatcaaccagttcaaggagttaatggaccaagttgatgagcctcttaaaagaacattcaagaacgttcatcagggatatgtagtcgaaactttggagagatttcttaaagcaagagagggaaatgttacaaaagcccacaagatgttggtggatagcttacagtggaggctgcaaaatgggatagatgacattttagctaaaccgattattcctgctaatttctacagaggagttcgtgattcgcagctgataggactgtctggttacacaagagagggccttcccgtgtttgctatcggtgcaggcctcagcacattcgacaaagcatctatccattattatgtgcaatcacacattcaaataaatgaatatcgggatcgtgtgatactgccggctgcaactaaaaggaatggaaagtatattggcaagtgtgtaaaggttttagatatgagtggcctaaagctttctgcactgaaccagattaagctgctgacaacaatctctactgttgatgatctcagctacccagagaaaacgatcacatattatatagtaaacgtcccctacatattctcagcttgttggaaggttgtgaaaccgctgttgcaagagagaacaaagttaaaaatacgagtgttgcaaggtggaggtcgtgacgagctgttaaagataatggactacccttcactccctcatttctgccgaagagatgggtctggatccgggtccggttctgggtcaggagcgggcaattcgaatgataattgctactcattgaaccatccatttcatcaagaactttacaactacatgagggaactatcagggattgatgaaccaaaagagccaacaaagcaaggatcgatccacgtggaagtgccgatgggggaccacaaaggcgtagagttacacagaacgttggaatcggagctgatgaagctcagaacccgaaagagcctctctgggtctttagagaaagtcaagatcagtgattaaagatataattatgaagacgagtgattagtagtgtgactatgtggtgttgtttagtcattagttgctcattgtgcggatgtatttgtattagatctacacgcatcatgtatcatctatggtccatttaggtagtaggagttgcaatagagatgctttagtaatggacataaatagaaggttcatgttaactaactctgtaatgtatcaatcctgtatgtgttttagtaagtggtttagtcaaaaaaaaaaaaaaaaaaa

SEQ ID NO: 36 - protein, 339 aa, Helianthus tuberosus
MGLPPHEAINQFKELMDQVDEPLKRTFKNVHQGYVVETLERFLKAREGNVTKAHKMLVDSLQWRLQNGIDDILAKPIIPANFYRGVRDSQLIGLSGYTREGLPVFAIGAGLSTFDKASIHYYVQSHIQINEYRDRVILPAATKRNGKYIGKCVKVLDMSGLKLSALNQIKLLTTISTVDDLSYPEKTITYYIVNVPYIFSACWKVVKPLLQERTKLKIRVLQGGGRDELLKIMDYPSLPHFCRRDGSGSGSGSGSGAGNSNDNCYSLNHPFHQELYNYMRELSGIDEPKEPTKQGSIHVEVPMGDHKGVELHRTLESELMKLRTRKSLSGSLEKVKISD

SEQ ID NO: 37 - DNA, 471 bp, Hordeum vulgare
gcaccgtgcagcggagcagagcgccgcagcgtcacctcggaccaccgagggctgctggcaggcaggggggggagctcaaaaggcaaacaagactctctctctctctgctttctccccgtttgaggtttgacctctcctccagctccagaggccccccgcaagtctctcgcgacgaccgtcgccgggcaatggcggccgcctcggaggagtccgtcaagcagttctccgcgctcatggagcagctggaggagccgctcaagaccacattccagaatgtgcaccaaggatatccaagagggactctgctgcgttttctaaaggccagagaatggaacgtccccaaggcttataaaatgctaatggattgcttgaattggaggcttcagaatgagattgacagcgttctagccaaaccaatattgcccgctgatttgtatagatctattcgtgatacgctacttgttggattaa

SEQ ID NO: 38 - protein, 94 aa, Hordeum vulgare
MAAASEESVKQFSALMEQLEEPLKTTFQNVHQGYPRGTLLRFLKAREWNVPKAYKMLMDCLNWRLQNEIDSVLAKPILPADLYRSIRDTLLVGL

SEQ ID NO: 39 - DNA, 566 bp, Vitis sp.
  unsure (4)
  unsure (111)
  unsure (537)
ttangaacataaaagacccaaaaagagctgcaaagttttgatcttcaattttgaggaaactgctggcattttgaaatgggaatcgttgctgaagacgcggtcaatcagttngaagcattgatgaaccaggttgacgagcctctgaagaaaacattccagaatattcatcaaggatatccaactggaactctggtgcgttttctaaaagcaagagaatggaatgttcccaaagcccacaaaatgttggtggattgcctaaactggagggtggaaaatgacattgacaatattttggcaaaacctatagttcctactgatttgtacagaggagtgcgtgattcacagctcataggattgtcaggttacacaaaagagggccttccggtgtttgctattggtgcagggttcaacacctttgacaaagcatctgttcactactatgtgcaatcacacattcaaatcaatgaatacccgggatcgtgtaaatttgcccttctgcatcaaaaaagcatgggcgacatattacttcttgtgtgnaaggccttaaatatgactgggcctaaagc

SEQ ID NO: 40 - protein, 132 aa, Vitis sp.
  UNSURE (12)
MGIVAEDAVNQXEALMNQVDEPLKKTFQNIHQGYPTGTLVRFLKAREWNVPKAHKMLVDCLNWRVENDIDNILAKPIVPTDLYRGVRDSQLIGLSGYTKEGLPVFAIGAGFNTFDKASVHYYVQSHIQINEY

SEQ ID NO: 41 - DNA, 1447 bp, Vitis sp.
atttaagaacataaaagacccaaaaagagctgcaaagttttgatcttcaattttgaggaaactgctggcattttgaaatgggaatcgttgctgaagacgcggtcaatcagttgaagcattgatgaaccaggttgacgagcctctgaagaaaacattccagaatattcatcaaggatatccaactggaactctggtgcgttttctaaaagcaagagaatggaatgttcccaaagcccacaaaatgttggtggattgcctaaactggagggtggaaaatgacattgacaatattttggcaaaacctatagttcctactgatttgtacagaggagtgcgtgattcacagctcataggattgtcaggttacacaaaagagggccttccggtgtttgctattggtgcagggttcagcacctttgacaaagcatctgttcactactatgtgcaatcacacattcaaatcaatgaataccgggatcgtgtaattttgccttctgcatcaaaaaagcatgggcgacatattacttcttgtgtgaaggtcttagatatgactggcctaaagctttcagcactgagccagataaagctactgactattatgtcaaccatcgatgacttgaactacccagagaagacaaatacatattacattgtaaacgccccatatatattttcagcatgttggaaggttgtcaagcctcttttgcaggaaagaacaagaaaaaagattcaggtcttgccaggttgtggacgagatgagctgctaaagataatggattatgcatccctcccccatttctgtagaagagaaggctctggatcatcccgccattcagggaatgaaactgataattgctataccttggatcatcccttccatcaacagctttataactacatcaaagaacaagcctcaattattgcaccggctggaccatataaacaggggtctattcatgtgcatctgcccgagtcagctgtagaagaatcagagattgctaaaaccatagaatctgagttacagaagtttgggaatcagactaggctcacagactcattggatgccctgaaagtcagtgataacagaaactaaagagatcatttcctcattggcagctgctagacaagggatatgcatgtcacttctgccatgggggggcttcaactattatttgtagtcgtagcagctcactttatctcagagtgagttttgctagctcaagctaattatatgtacttgctattttatccacgggccttaatggtgtaagaaaaaggcacctaagaatagtaatccatgtatctctacctgcacatcttgtaagttaatttcgggaaattctgttctagccttcaactgtttcaggcttccatgtttgccagggacagtgaggaaggtgcaatataaactgtcaatgttctaggtccaaaaaaaaaaaaaaaaaaa

SEQ ID NO: 42 - protein, 326 aa, Vitis sp.
EALMNQVDEPLKKTFQNIHQGYPTGTLVRFLKAREWNVPKAHKMLVDCLNWRVENDIDNILAKPIVPTDLYRGVRDSQLIGLSGYTKEGLPVFAIGAGFSTFDKASVHYYVQSHIQINEYRDRVILPSASKKHGRHITSCVKVLDMTGLKLSALSQIKLLTIMSTIDDLNYPEKTNTYYIVNAPYIFSACWKVVKPLLQERTRKKIQVLPGCGRDELLKIMDYASLPHFCRREGSGSSRHSGNETDNCYTLDHPFHQQLYNYIKEQASIIAPAGPYKQGSIHVHLPESAVEESEIAKTIESELQKFGNQTRLTDSLDALKVSDNRN

SEQ ID NO: 43 - DNA, 565 bp, Zea mays
  unsure (8)
  unsure (155)
  unsure (276)
  unsure (477)
  unsure (528)
  unsure (548)
  unsure (555)
  unsure (557)
gggagagntggaaaaggcaggaaagacccggcttttgaccccaagtaccctgttgagggcaatggcggccacctccgaggaggcaatcaagcagttctcggcgctcatggagcagctagaggagccgctaaagagcacattccagaatgtgcatnaaggaaatctgagagggactttgatgcgttttctgaaggctagagaatggagtgtgcctaaagcttataaaatgctaatggattgcttaaactggagagtacagaatgagattgacatcgngttagctaaacccattctgccatctgatatatatagagttattcgggacacgttacttgttggattgacagggtactccaagcagggacaacctgtttatgcatttggtgtgggtcttagtactttcgacaaggcctcggtgaactactatgtgcaatcacacatcagatgaaatgaatatcgagaaccgtgttggcctgncggctgcattaaagaagtttgggagacagaattaatacctgctttgaaggntatggatatgactgggcttnaacttgntncacttgaa

SEQ ID NO: 44 - protein, 168 aa, Zea mays
  UNSURE (32)
  UNSURE (72)
  UNSURE (129)
  UNSURE (139)
  UNSURE (156)
  UNSURE (163)
  UNSURE (165)..(166)
MAATSEEAIKQFSALMEQLEEPLKSTFQNVHXGNLRGTLMRFLKAREWSVPKAYKMLMDCLNWRVQNEIDIXLAKPILPSDIYRVIRDTLLVGLTGYSKQGQPVYAFGVGLSTFDKASVNYYVQSHIRXNEYREPCWPXGCIKEVWETELIPALKXMDMTGLXLXXLE

SEQ ID NO: 45 - DNA, 1400 bp, Zea mays
ccacgcgtccgggagagctggaaaaggcaggaaagacccggcttttgaccccaagtaccctgttgagggcaatggcggccacctccgaggaggcaatcaagcagttctcggcgctcatggagcagctagaggagccgctaaagagcacattccagaatgtgcatcaaggaaatctgagagggactttgatgcgttttctgaaggctagagaatggagtgtgcctaaagcttataaaatgctaatggattgcttaaactggagagtacagaatgagattgacatcgtgttagctaaacccattctgccatctgatatatatagagttattcgggacacgttacttgttggattgacagggtactccaagcagggacaacctgtttatgcatttggtgtgggtcttagtactttcgacaaggcctcggtgaactactatgtgcaatcacacatacagatgaatgaatatcgagatcgtgttgtcctgccggctgcatcaaagaagtttgggagacagattaatacctgcttgaaggttatggatatgactggcctcaagctgtctgcactgagccaaataaagatgttgacgatgattactactgttgatgaccttaattatcctgagaaaacggaaacttattacattgtaaatgctccatatgttttttcagcgtgttggaaggttgtgaagccactcttacaagaaagaactaaaaagaagatccaagtcctgtatggctctgggagggatgagttactgaaggtcatggactacgagtcacttccgcacttctgcaagagagaagggtcaggttcatccagcgactcgctggatggagtagattgctactcctacgaccaccctttccaccagcagctgtacaactacatgaagcagcagcaatctctgaatcaggactccgttggtcccagaaaacaaggctcggtccacgtggatgtgccctcgcctggccttgaggaggccaagattgcggagacgatcaaagcagagctccagaatttgaggggaagcggcggtctcgcccattcattcagcagcatccagatcgaaggtccatgagggcgcgcgccagtgacccgaagagaagctcttggtaatggtgcctcctgcttgcagtcactggctgcaggcttgaccggggcgaatagagagcgggattctaataactgtatccgcgattgttgtgatttctaattaaccaagtgggcgtgtatcgccatgcttgtactatccctgtatgtatgtatatataacggccaactggacggagtttatgtaactccctgctaattacttagaatgctcatcttttattttactccaatatagtgaaaatttcgcttaaaaaaaaaaaaaaccacaaacacaaaggggggg

SEQ ID NO: 46 - protein, 336 aa, Zea mays
MAATSEEAIKQFSALMEQLEEPLKSTFQNVHQGNLRGTLMRFLKAREWSVPKAYKMLMDCLNWRVQNEIDIVLAKPILPSDIYRVIRDTLLVGLTGYSKQGQPVYAFGVGLSTFDKASVNYYVQSHIQMNEYRDRVVLPAASKKFGRQINTCLKVMDMTGLKLSALSQIKMLTMITTVDDLNYPEKTETYYIVNAPYVFSACWKVVKPLLQERTKKKIQVLYGSGRDELLKVMDYESLPHFCKREGSGSSSDSLDGVDCYSYDHPFHQQLYNYMKQQQSLNQDSVGPRKQGSVHVDVPSPGLEEAKIAETIKAELQNLRGSGGLAHSFSSIQIEGP

SEQ ID NO: 47 - DNA, 733 bp, Zea mays
cgagcaaacagtcaaacactgggacgcggagtcgcggacgcctgcgcgatcagcgaacggaaggaagaccgtggaagcaaagaggcgcaagcgagcacggaacagatacaccttcaggtggcctccctccgactgccgactgaatcttccacctcgcttcgcgcctccggctccgcgccgggcccgcataatctgtgctcgggatcgcctcttcccgcggcaaatgggggccgactccgaggacgccgtcaagcagctcagcctcctcatggagcaagtggaggccccgctgaagagatcgtttcagaatatgcaccagggctatcccaaagaaacactggtgcgtttccttaaggctagagagtggaacgtaccaaaggctcataaaatgattgttgattctttggattggaggattgaaaatgaaattgatagtgtgctagagagacctatagtcccagtagatttatacagatcaatacgtgattcacaacttattggcctgtcaggatacacaaaggagggtctcccagtttttggcattggtgttggacatagcacatatgacaaagcttcggttcactactatgtgcaatctcatatccagattaatgagtaccgtgatcgtataattttgcctaggctgacacaacagtttgagcggcctgttgtcaggtgcataaaagttctggatatgactggtttgaagctatcagcactgagccaaataaag

SEQ ID NO: 48 - protein, 170 aa, Zea mays
MGADSEDAVKQLSLLMEQVEAPLKRSFQNMHQGYPKETLVRFLKAREWNVPKAHKMIVDSLDWRIENEIDSVLERPIVPVDLYRSIRDSQLIGLSGYTKEGLPVFGIGVGHSTYDKASVHYYVQSHIQINEYRDRIILPRLTQQFERPVVRCIKVLDMTGLKLSALSQIK

SEQ ID NO: 49 - DNA, 1542 bp, Zea mays
ccacgcgtccgcgagcaaacagtcaaacactgggacgcggagtcgcggacgcctgcgcgatcagcgaacggaaggaagaccgtggaagcaaagaggcgcaagcgagcacggaacagatacaccttcaggtggcctccctccgactgccgactgaatcttccacctcgcttcgcgcctccggctccgcgccgggcccgcataatctgtgctcgggatcgcctcttcccgcggcaaatgggggccgactccgaggacgccgtcaagcagctcagcctcctcatggagcaagtggaggccccgctgaagagatcgtttcagaatatgcaccagggctatcccaaagaaacactggtgcgtttccttaaggctagagagtggaatgtagcaaaggctcataaaatgattgtagaatgtttgaattggaggattcaaaatgaaattgatagtgtgctggagaggcctatcgtcccagtagatttatacagatcaatacgtgattcacaacttattggcctgtcaggatacacaaaggagggtctcccaatttttggcattggtgttgggcatagcacatatgacaaagcttcggtccactactatgtgcaatctcatatccagattaacgagtaccgtgatcgtataattttgcctaggctgacacaacagtttgggcggcctgttaccagctgtataaaagtgctggatatgactggtttgaagctatcagcactaagccaaataaagatgttgacttccatatcgacagttgatgatctaaattaccctgaaaagacagagacctattatgtagtcaacgttccatacatattttctgcttgttggaaggttgtgaagcccttattgcaggagaggacaaaaaagaaggtcaaagttttgactggctgcgggagagatgaacttctgaagatcatggactactcatcactcccccatttctgccgccgggaaggctctggatcatcgaagcattcgtctaccgacgtcgacaactgcttctcccttgaccatccattccacaaagaactgtacggtcacatcagagagcaagcgtcgcgcagggagctcatcaagatgggatcgttgcatgtcagcatccccgagccggacccagacgacgcgaagatcgtcgaggtcatccaggccgagttccaaaagattggcgagcaggacgagtccaccaacagccacaaagattgacatcatgacctctgatgttcatttctgtatttcggttaacagtccccccggttgcctggggatttatagcagcaaaagccttgcagtcgcatggtgcaagtgcaagcttgacttcatgtagctggagaggctgagagataaaccagccagtgtatattagatgcacaagaagcgataatcacctttttgttagtatataaccaacacatatatgatatatttagctgtttattaaaagaggaagtccatggaagcgcctttggcaaagtttttcgccctaaaaaaaaaaaaaaaaaaaaaaaaaaaaaaaaaaaaaaaaaaaag

SEQ ID NO: 50 - protein, 327 aa, Zea mays
MGADSEDAVKQLSLLMEQVEAPLKRSFQNMHQGYPKETLVRFLKAREWNVAKAHKMIVECLNWRIQNEIDSVLERPIVPVDLYRSIRDSQLIGLSGYTKEGLPIFGIGVGHSTYDKASVHYYVQSHIQINEYRDRIILPRLTQQFGRPVTSCIKVLDMTGLKLSALSQIKMLTSISTVDDLNYPEKTETYYVVNVPYIFSACWKVVKPLLQERTKKKVKVLTGCGRDELLKIMDYSSLPHFCRREGSGSSKHSSTDVDNCFSLDHPFHKELYGHIREQASRRELIKMGSLHVSIPEPDPDDAKIVEVIQAEFQKIGEQDESTNSHKD

SEQ ID NO: 51 - DNA, 699 bp, Zea mays
  unsure (15)
  unsure (86)
gcatgggcggcgtcnacaggaccggccaccccatcatcgtcggcttgctcgccaagcactactccgccaaccgcgacatggcgganttcaagagttttgtggtctacttcttcgacaagatctgtgccagaatccccagagggcaggagaaattcctctgcatcgttgatctcaagggctgggggtactcaaactgtgacgtccgggcatacattgccgctatagagatcttgcagaactactacccggagcggctcggcaaggcgctgatgatccacgtgccctacatcttcatgaaggcgtggaagatgatctaccccttcatcgacaccaacaccagggacaagttcgtgttcgtggaggacaagagcctgcaggagacgctgcggcgggagatcgacgaggggcagctcccagagttcctcggcggcaagatggacgtgatcccacttcaaggactatggcgtgcagcagcagcctcaggccgtgtaatgccatgcgtatatacagcatacacgagttgtgttgagctatagcaagctggtggctaggagcatagcatggcaataactgtgtagctgctgtgaaagtgaaactgaaacgttgcgctgtttagccgggtcaattgaccagctcaactgcagatctctggggctaccactatgaacagcaagaactgtttccgttatcttttcagcc

SEQ ID NO: 52 - protein, 151 aa, Zea mays
  UNSURE (5)
  UNSURE (28)
MGGVXRTGHPIIVGLLAKHYSANRDMAXFKSFVVYFFDKICARIPRGQEKFLCIVDLKGWGYSNCDVRAYIAAIEILQNYYPERLGKALMIHVPYIFMKAWKMIYPFIDTNTRDKFVFVEDKSLQETLRREIDEGQLPEFLGGKMDVIPLQ

SEQ ID NO: 53 - DNA, 1101 bp, Zea mays
cgatcctccacagcagcacccgccgccgccgcctcttcccttgcgcacctgctgctgtgcggatcggtgaggcggaggagtaggatggcgagcgcggccggaggcggagcggcgggggaaggggagtggcttaaggtatcccagctcaggcccatggtggaagcgcaggaccccaacgccaaggcggtggacaacctgacgctgcgtcggttcctgcgcgcgcgcgaccacgacgtggacaaggcctccgccatgttcctcaagttcctcaggtggcgggcggaggcggcgcccggcggcggcaccgtgcgggaggagcaggtgcgcggggagctggagcaggacaagatctacatgggcggcgtcgacaggaccggccgccccatcatcgtcggcttgctcgccaagcactactccgccaaccgcgacatggcggagttcaagagttttgtggtctacttcttcgacaagatctgtgccaggatccccagagggcaggagaagttcctcgccatcatggatctcaagggctggggctacgcaaactgcgacgtccgggcctacatcgcggccattgagatcatgcagaactactacccggagcggctgggcaaggcgctgatgatcaacgtgccctacatcttcctcaaggtgtggaagacgatgatctaccccttcatcgacgccaacaccagggacaagttcgtgttcgtggatgacaagagcctgcgggagacgctgcggcgggagatcgacgagagccagctcccggagttccttggcgggaagatgcctctcgtctccctcaaggactacgcccagcagcctcagcccgtttgcgagtgagtctgtcgtagcgatggtggccggccggtgacgtgagcgacccaaagccgaaagctgattcgatctagactaagctaatacagcctacaagagggaggaagagaggccctacccgtggaattaagtcattagtttgtggcccaattcaataagaaagtaaatgtggtgtgtgaaaaaaaaaaaaaaaaaaaaaaaaaaaaaaaaaaaaaaaaaaaaaaaaaaaaaaaaaaaaaaaaaaaaaaaaaaaaaaaaaaa

SEQ ID NO: 54 - protein, 253 aa, Zea mays
MASAAGGGAAGEGEWLKVSQLRPMVEAQDPNAKAVDNLTLRRFLRARDHDVDKASAMFLKFLRWRAEAAPGGGTVREEQVRGELEQDKIYMGGVDRTGRPIIVGLLAKHYSANRDMAEFKSFVVYFFDKICARIPRGQEKFLAIMDLKGWGYANCDVRAYIAAIEIMQNYYPERLGKALMINVPYIFLKVWKTMIYPFIDANTRDKFVFVDDKSLRETLRREIDESQLPEFLGGKMPLVSLKDYAQQPQPVCE

SEQ ID NO: 55 - DNA, 761 bp, Oryza sativa
  unsure (69)
  unsure (73)
cttacacggcacgagcttacaccgtttgacctcgccctgctcaccgcgaaggctcgcccccctccctcnaaantccccgccgccgtcaccggcggcaggcagcaatggcggccgcttcggaggaggccatcaagcagttctccgcgctgatggagctgctggatgagccgctcaagaccacattccagcatgtccatcaaggatacgcaagaggaactctggtgcgttttctaaaggccagagaatggaatgttccgaaagcacataaaatgttaatggattgcttaaattggaggatacaaaatgggattgacagcgttctggctaaacctatagtcccttctgatttatacagaactattcgggatacgctgctggttggattgacaggatactccaagcagggacaacctgtctatgcattcggtgttgggcttagtacccttgacaaggcatcggtgcactattatgtgcaatcacacatacagatgaatgaatatcgagatcgtgttgtactgccgaaagcctctaagatgttcgggaaacagattaacacttgcctaaaggttatggatatgacggggctgaagctttctgccttgaaccaaataaagatgttatctacgataacagccatcgatgaccttaactatcctgagaaaacagagacctatttcattgtcaatgctccatatgttttttcaagcatgttggaaggttgtgaagcctcttctacaaggaaagaacaaaaaggaaaatta

SEQ ID NO: 56 - protein, 218 aa, Oryza sativa
MAAASEEAIKQFSALMELLDEPLKTTFQHVHQGYARGTLVRFLKAREWNVPKAHKMLMDCLNWRIQNGIDSVLAKPIVPSDLYRTIRDTLLVGLTGYSKQGQPVYAFGVGLSTLDKASVHYYVQSHIQMNEYRDRVVLPKASKMFGKQINTCLKVMDMTGLKLSALNQIKMLSTITAIDDLNYPEKTETYFIVNAPYVFQACWKVVKPLLQGKNKKEN

SEQ ID NO: 57 - DNA, 1612 bp, Oryza sativa
gcacgagcttacacggcacgagcttacaccgtttgacctcgccctgctcaccgcgaaggctcgcccccctccctcttccctccccgccgccgtcaccggcggcaggcagcaatggcggccgcttcggaggaggccatcaagcagttctccgcgctgatggagctgctggatgagccgctcaagaccacattccagcatgtccatcaaggatacgcaagaggaactctggtgcgttttctaaaggccagagaatggaatgttccgaaagcacataaaatgttaatggattgcttaaattggaggatacaaaatgggattgacagcgttctggctaaacctatagtcccttctgatttatacagaactattcgggatacgctgctggttggattgacaggatactccaagcagggacaacctgtctatgcattcggtgttgggctcagtacccttgacaaggcatcggtgcactattatgtgcaatcacacatacagatgaatgaatatcgagatcgtgttgtactgccgaaagcctctaagatgttcgggaaacagattaacacttgcctaaaggttatggatatgacggggctgaagctttctgccttgaaccaaataaagatgttatctacgataacagccatcgatgaccttaactatcctgagaaaacagagacctatttcattgtcaatgctccatatgttttttcagcatgttggaaggttgtgaagcctcttctacaagaaagaacaaaaaggaaaattaaagtcctgtacggctcaggaagagatgaattactaaaggttatggactatgaggcactcccaaacttttgcaagcgagaaggatcaggctcgtcgaatgattcgtcggatggagttgattgctactcctatgatcacccttttcaccaggagctgtataattacatcaaacagcaagccctgaatgaagacttcatcggtcccataaagcaaggctcaatgcatgtggatgtgcccacacctgatctggaagaggccaagatcatggagacgatcgaatcggagctccacaaattcagtggagctaatggcctctcgcattcattcaacaagatcaagattgaaggtccgtgatgttgcccgtgatcatatctcgtgacggagacgacgatctgcggagatattatgcttatccatctccagccccagggaacctacggtggggttatagcactccttgcttgcaatctctagctgcaggcttgactaggatccacgagtagaaagaggttagtaattgtgatgcgattctaataaccgaatccgtattatctgaaagtgtagccagttctttttctaattaacctagcgactgtatcatctgcgacacgttactatttcagtgcttatggcaactgggaaggaaatgtgatgtttccagtccttccgagtaagttgctgccctaaatatatatgtaacagtgtatgtatagcctctagctgccttttgattgcagtggtatatatcaagtgctgtactcactgctaagaatgaatcatctgcatgtttcatttcactggatgctgtgaaatttggtaaaaaaaaaaaaaaaaaaaaaaaaaaaaa

SEQ ID NO: 58 - protein, 335 aa, Oryza sativa
MAAASEEAIKQFSALMELLDEPLKTTFQHVHQGYARGTLVRFLKAREWNVPKAHKMLMDCLNWRIQNGIDSVLAKPIVPSDLYRTIRDTLLVGLTGYSKQGQPVYAFGVGLSTLDKASVHYYVQSHIQMNEYRDRVVLPKASKMFGKQINTCLKVMDMTGLKLSALNQIKMLSTITAIDDLNYPEKTETYFIVNAPYVFSACWKVVKPLLQERTKRKIKVLYGSGRDELLKVMDYEALPNFCKREGSGSSNDSSDGVDCYSYDHPFHQELYNYIKQQALNEDFIGPIKQGSMHVDVPTPDLEEAKIMETIESELHKFSGANGLSHSFNKIKIEGP

SEQ ID NO: 59 - DNA, 1084 bp, Oryza sativa
gcacgaggcaattcaagaggagaggagaggagagctagctaaggcagccatggattactgcaagcagcaggagcgagacgggcaccgcgacgatggcgatgtgacggagtggaagaaggtggccgagctgagagccgtcgtcgaagcccaggaccctgcatgcaaggaggaggacgactaccagctgcgccggttcctgcgcgcgagagaccacaacatcggcaaggcgtcggcgatgctggtgaagtacctgcagtggaagcgcgaggtgaagcccggcggccgcgccatcgccgacgaggaggtgcgcggcgagctggcgcaggagaagctctacatgcagggctacgaccggcaggggcgccccctggtgtacggcttcggcgcccgccacttcccggcgcgccgcgacctcgacgagttcaagcgctacgtcgtctacgtcctcgaccgcacctgcgcccgcctcggcggcaatggcgggcaggagaagttcgccgccgtggccgacctgcaggggtgggggtactacggcaactgcgacatccgcgcgtacgtggcggcgctggagatcatgcagaactactacccggagaggctggggagggtgttcttgatccatgtcccctacgtgttcatggcggcctggaagatcatctaccccttcatcgacgacaacaccaagaagaagttcgtcttcgtcgccgacaaggacctccacgccacgctccgcgacgccatcgacgactccaacctcgccgaggactacggcggcaagctcaagctcgtctcgccccttattaatggcgccaccgaatccaatcgccgccggtagatagctctcgcgtcgcgtgcatgaagatcgatatgatgtatgtacacccatctcgagatccaatttaatggtatgtatgtagcacgtgtacggtgtacgtgaatgtatgttactagtatgtatacgggacaggaggacactacgaattcgaggacgtacgtgcgtgctatatacattgaattacggctctgaacagtactgatcatgaatgatcactgttgatgagaaatgcaagttcctctgcatcaa

SEQ ID NO: 60 - protein, 261 aa, Oryza sativa
MDYCKQQERDGHRDDGDVTEWKKVAELRAVVEAQDPACKEEDDYQLRRFLRARDHNIGKASAMLVKYLQWKREVKPGGRAIADEEVRGELAQEKLYMQGYDRQGRPLVYGFGARHFPARRDLDEFKRYVVYVLDRTCARLGGNGGQEKFAAVADLQGWGYYGNCDIRAYVAALEIMQNYYPERLGRVFLIHVPYVFMAAWKIIYPFIDDNTKKKFVFVADKDLHATLRDAIDDSNLAEDYGGKLKLVSPLINGATESNRRR

SEQ ID NO: 61 - DNA, 553 bp, Glycine max
  unsure (356)
  unsure (389)
  unsure (438)
  unsure (483)
  unsure (486)
  unsure (500)
  unsure (522)
  unsure (542)
cctacatacataggaagctacaacatagtacaaactcacctccaagtccacgcttttgttcttgcagagtaagagagaggaggtggacaaataaagctataatttttagaggggttaccaccctcaccttctgccaaaccaaacccacccttttctgtcttcaagctactatcgtgctgagagctgaacaagaagatggggggtggaaatcaagaggcagtcaagcagctgcagaccctgatggaaaatgtggatgatgagcagctgagaatacatccaagattatgcaccagggttatcaaacgggaaacgttaatacggtttctcaaagctagggactggagtgttgccaaagnccataaaatggtaatgatttgtttgaactgganggtggaaaatgagattgacaatggttttaaggaagctatccctacggantttgtcaaaggcatacggggattcccaaccttataggaatggccnggntactcaaaggaggntcaactgtcaatgctggttggnggttgggctcagtcatatgntaaagcatctg

SEQ ID NO: 62 - protein, 57 aa, Glycine max
MGGGNQEAVKQLQTLMENVDDEQLKNTFQIMHQGYQTETLIRFLKARDWSVAKAHKC

SEQ ID NO: 63 - DNA, 1524 bp, Glycine max
gcacgagcctacatacataggaagctacaacatagtacaaactcacctccaagtccacgcttttgttcttgcagagtaagagagaggaggtggacaaataaagctataatttttagaggggttaccaccctcaccttctgccaaaccaaacccacccttttctgtcttcaagctactatcgtgctgagagctgaacaagaagatggggggtggaaatcaagaggcagtcaagcagctgcagaccctgatggaaaatgtggatgatgagcagctgaagaatacattccagattatgcaccagggttatcaaacggaaacgttaatacggtttctcaaagctagggactggagtgttgccaaagcccataaaatgttaattgattgtttgaactggagggtggaaaatgagattgacaatgttttaaggaagcctatccctacggatttgtacaaagccatacgggattctcaacttataggaatgtctggttactcaaaggaggatctacctgtcattgctgttggtgttgggctcagtacatatgataaagcatctgacaaatactatatacaatcacacatccaactgaatgaatatagggatcgagtgatcttgccaacagctacaaggaaacatggacgatacattggcacctgtgttaaagtgttggatatgtctggtttaaaattttctgcattgaatcaattgaggttgttgactgctatatctacaatagatgacttgaactatccggaaaagacagacacatactatattgttaatgcaccatatgtattctcagcgtgttggaaggttgtgaagcctcttttgcaagaaagaaccaggagaaaaatccaggtgctgcaaggttgtgggaaggaggaattactaagggtcatggactatgcatcccttccacacttctgcagaaaagaagattccaagtcatccaaacatcatgcttcaggaaactctgaaaattgtttctccttcaatcatgccttccatcaacaactctacaatcacatcaagcaacaagccatcattatggagtcaatttcaccaatcagacaagggtccttctgtgtagacataccagagccagaccctgatgatgccaaaatagccaagaccatagaaaatgagttccacaaattggagaatcagaagaatggttttaccaactcactaactggtcttacagttaatggccattgaaagctatgctactaaagctagtaactgtttttggcctctcctgagccacttttatttgttgattactttatggtcccttttggaaaaggagggttatacttgtaggtcatacttatacccggttattagatctaatattgtaatgtttgcatcaactagatgcaaaattcttcaggcagaccttaatctaatttctacaaccaccttgagatgataagcatatgatatatgttcaatgtagaaaagatggcaccatgctacaattcatatggttgtctaggtacattaaaaaaaaaaaaaaaaaa

SEQ ID NO: 64 - protein, 338 aa, Glycine max
MGGGNQEAVKQLQTLMENVDDEQLKNTFQIMHQGYQTETLIRFLKARDWSVAKAHKMLIDCLNWRVENEIDNVLRKPIPTDLYKAIRDSQLIGMSGYSKEDLPVIAVGVGLSTYDKASDKYYIQSHIQLNEYRDRVILPTATRKHGRYIGTCVKVLDMSGLKFSALNQLRLLTAISTIDDLNYPEKTDTYYIVNAPYVFSACWKVVKPLLQERTRRKIQVLQGCGKEELLRVMDYASLPHFCRKEDSKSSKHHASGNSENCFSFNHAFHQQLYNHIKQQAIIMESISPIRQGSFCVDIPEPDPDDAKIAKTIENEFHKLENQKNGFTNSLTGLTVNGH

SEQ ID NO: 65 - DNA, 615 bp, Triticum aestivum
  unsure (352)
  unsure (369)
  unsure (434)
  unsure (441)
  unsure (447)
  unsure (477)
  unsure (494)
  unsure (538)
  unsure (555)
  unsure (566)
  unsure (585)
  unsure (599)
cgcaacgacaaaccgacccaccgaccaagacgagagccggtcgaccgacgactcggaggagaccgtctcctccccctcgtccaccgccccctgaacctgaacgtctttccctctgaagcctgaatccgcgccagaaccccgtagaatcggccgccccgctccgctcggctcccctcccgcctcctcgagcgcgcgcaatgggggccgcctgcgacgacgccgtccagcagctcgcccacctcctcgaccaagtcgaggagcgctgaagaagacttccaagaatgtgcaccaaggatgtccatcagagacactaatgcgcttccttaaagctagagagtggcatgttactaangctcataaaagcttggnggatgtttggattggaggatacaaaatgaaattgacagtatactgggagaaactataacccaatngactggntagatngatacgagaacacacttgttgggtttatcnggatatcaaaggaggcncccaatgtttgccttggggttgggaagacaattgacaacttcgnccatacaagtgcatccnaattcagttanatacgtgatgttattgcanggacaaaattttcnactaaacactttaagt

SEQ ID NO: 66 - protein, 79 aa, Triticum aestivum
  UNSURE (22)
  UNSURE (52)
  UNSURE (58)..(59)
MGAACDDAVQQLAHLLDQVEEXLKKTSKNVHQGCPSETLMRFLKAREWHVTXAHKSLXXCLDWRIQNEIDSILGETITQ

SEQ ID NO: 67 - DNA, 1523 bp, Triticum aestivum
cgcaacgacaaaccgacccaccgaccaagacgagagccggtcgaccgacgactcggaggagaccgtctcctccccctcgtccaccgccccctgaacctgaacgtctttccctctgaagcctgaatccgcgccagaaccccgtagaatcggccgccccgctccgctcggctcccctcccgcctcctcgagcgcgcgcaatgggggccgcctgcgacgacgccgtccagcagctcgcccacctcctcgaccaagtcgaggagccgctgaagaagacgttccagaatgtgcaccagggatgtccatcagagacactagtgcgcttccttaaagctagagagtggcatgtaactaatgctcataaaatgcttgtggattgtttgaattggaggatacaaaatgaaattgacagtatactggagaaacctataaccccagtagacttgtatagatcgatacgagaatcacagcttgttgggttatcgggatactcaaaggagggcgtcccagtgtttgcctttggtgttggacagagcacatatgacaaagcttcggtccattactatgtgcaatctcatattcagatcaatgagtaccgtgatcgtattattctgcccatggcgacgaagaagtttagacgacctataaccacctgtataaaggttcttgatatgactggtctgaagttgtcagcactgagcctattgaagattttgactgcaatatctgctgtcgatgaactgaattaccctgaaaaggccgagacctattatattgtgaatgctccatatatattctcagcgtgttggaaggttgtgaaacctctactgcaagagaggacaagaaagaaggttcatgttttgagtggtcgtgggaaagatgagctcctaaagattatggaccattcctccatcccccatttctgtcgacgagagggttcatcaaaagcttcgttgagcagcatcgatgactgcttctcgctcgaccaccctttccaccaagagctctaccattacatcgagcagcaggcgctgaatcaggaactcatcaagcagggttctttgcacgtagacatccccgatcaagaccccgatgacgccatgattgtggaggtcatccaggccgagtttcacaagctcggtgaacagaatgggtctgccgatggcgaccaaaaataacggtgtccgtgatgtcagcggtgtggcacgacagatgtgtgttgctgtgatgaaactgatgatccatttcggtgtttgcgatgtttgcttgaccagcctgctgttgtttgtggggtgaccagttccatggtgcaagactgaggtagaagaagcaaccgatgtatactagatagaaataaccacctattcacctgttgtatactttggcaatgtgctgtcatatgtatgtcctctaagctaggagtaaatcatcctgtaacatggatgcaaaaataatcttgagagtaccatccttcaatcagaaataaatggtgcatcttgacctttgccaaaaaaaaaaaaaaaaaa

SEQ ID NO: 68 - protein, 325 aa, Triticum aestivum
MGAACDDAVQQLAHLLDQVEEPLKKTFQNVHQGCPSETLVRFLKAREWHVTNAHKMLVDCLNWRIQNEIDSILEKPITPVDLYRSIRESQLVGLSGYSKEGVPVFAFGVGQSTYDKASVHYYVQSHIQINEYRDRIILPMATKKFRRPITTCIKVLDMTGLKLSALSLLKILTAISAVDELNYPEKAETYYIVNAPYIFSACWKVVKPLLQERTRKKVHVLSGRGKDELLKIMDHSSIPHFCRREGSSKASLSSIDDCFSLDHPFHQELYHYIEQQALNQELIKQGSLHVDIPDQDPDDAMIVEVIQAEFHKLGEQNGSADGDQK

SEQ ID NO: 69 - DNA, 679 bp, Triticum aestivum
  unsure (448)
  unsure (546)
  unsure (572)
  unsure (577)
  unsure (586)
  unsure (618)
  unsure (620)
  unsure (635)
  unsure (637)
  unsure (644)
  unsure (653)
  unsure (659)
cggtagggggagctcaaaaggcaaacaagacactctgctttctccccgtttgaggtttgacctctccccagctccagagccccgcaagtctccccctcctcccctcgcgacgaccgtcgccggcaatggcggccgcctcggaggaggccatcaagcagttctccgtgctcatggagcagttggaggagcccctcaagaccacattccaagaatgtgcaccaaggatatccaagagggactctgctgcgctttctcaaggccaagagaatggaacgttccgaaagcatataaaatgctaatggattgcttgaattgggaggcttcagaatgagattgacagcgttctaactaaaccaatattgcccgctgatttgtatagatctattccgtgatacactgcttgttggattaacaagatattccaagcaaggtcaacctgtctatgcanttggtgttgggctcaatactttgacagacatcggtgaactacaattgcagtccacatacagatgaattatatcagatcgtgttgcctgcaagtgatcnaaattccggaaacagttacaccgctnaaatnaggtatacngctaacttcgcttacaataagtttacacatanantgttgtaccatttcnanaaacggntttattgancccaanttttcgagtgaggtgaccct

SEQ ID NO: 70 - protein, 119 aa, Triticum aestivum
  UNSURE (107)
MAAASEEAIKQFSVLMEQLEEPLKTTFQNVHQGYPRGTLLRFLKAREWNVPKAYKMLMDCLNWRLQNEIDSVLTKPILPADLYRSIRDTLLVGLTRYSKQGQPVYAXGVGLNTLTDIGE

SEQ ID NO: 71 - DNA, 1660 bp, Triticum aestivum
cggtagggggagctcaaaaggcaaacaagacactctgctttctccccgtttgaggtttgacctctccccagctccagagccccgcaagtctccccctcctcccctcgcgacgaccgtcgccggcaatggcggccgcctcggaggaggccatcaagcagttctccgtgctcatggagcagttggaggagcccctcaagaccacattccagaatgtgcaccaaggatatccaagagggactctgctgcgctttctcaaggccagagaatggaacgttccgaaagcatataaaatgctaatggattgcttgaattggaggcttcagaatgagattgacagcgttctagctaaaccaatattgcccgctgatttgtatagatctattcgtgatacactgcttgttggattaacaggatattccaagcagggtcaacctgtctatgcatttggtgttgggctcagtacctttgacagagcatcggtgaactactatttgcagtctcacatacagatgaattagtatcgagatcgtgttgtcctgccaggtgcatctgagatgtccggaaaacagattaacacctgcttgaaagttatggatatgactggcctgaagctttctgctttgaaccaaataaagatgttgagcacgataacagctgttgatgacctcaattatcctgagaaaaccgagacgtattacattgtgaacgctccatatgttttttcggcatgttggaaggttgtgaagcctcttttacaagagcgaactaaaaagaagatcaaagtcttgtatggccctggaagagatgaattactgaaggttatggactacgcgtcactcccgcacttctgcaagagggaagggtccggttcgggttcgtcgtcggatgaagtcgactgctactcgtatgatcatccattccaccaggagctgtacaactatgtgaagcagcaagctctgaggaaccaggacagcgtcggccccgcgaagcaagggtcgatgcatgtgagggtgccgacgccggacctggaggaggccaagatcatggagacgatccagtcggagctccacaacctcaaggggggcgacggcatttcccgctccttcagcaggatcaccatcgaaggtccatgatatcttatttcctgctcgtatccaagatcgtcgtggatgtgatccatgatgatcggagtgcctcgagatgcgcggagcaggtaatcgcttattttatcttatttgacgccagaagattattctggggtttataacggttcttgcttgcgttgtaaccgctggctgcaaagctcgagtaggatcatatcagtagaggaagtagcagcagtagcatcggattctaataaccgagtgagtctgtatcgtggtgtcgaagatggtagtaattagtttgattaacctgtctaatggatgtaccatttgcgagttactgtttccatgcttctcatggcagggaaattgccatgctcccagacatgagtaacaccagcactatgtatcggaccaatcagtatatagtatatgtatgtatatgtaatcgccttctgatgttgcaactggtatatcattatgtatttgatttgatgttacctgaaccacgacttaaaaagaaatctgctgtctgtttcaaaaaaaaaaaaaaaaaa

SEQ ID NO: 72 - protein, 335 aa, Triticum aestivum
  UNSURE (131)
MAAASEEAIKQFSVLMEQLEEPLKTTFQNVHQGYPRGTLLRFLKAREWNVPKAYKMLMDCLNWRLQNEIDSVLAKPILPADLYRSIRDTLLVGLTGYSKQGQPVYAFGVGLSTFDRASVNYYLQSHIQMNXYRDRVVLPGASEMSGKQINTCLKVMDMTGLKLSALNQIKMLSTITAVDDLNYPEKTETYYIVNAPYVFSACWKVVKPLLQERTKKKIKVLYGPGRDELLKVMDYASLPHFCKREGSGSGSSSDEVDCYSYDHPFHQELYNYVKQQALRNQDSVGPAKQGSMHVRVPTPDLEEAKIMETIQSELHNLKGGDGISRSFSRITIEGP

SEQ ID NO: 73 - DNA, 407 bp, Triticum aestivum
  unsure (15)
  unsure (25)
  unsure (331)
  unsure (341)
  unsure (353)
  unsure (355)
  unsure (397)
gcgccaccgttgcancagcaatggnctacagtactgaagatgagcaccaacacggccatggctatggcgacggtgacgacgcggcggagtggaagaaggtggcggagctgagggccgtcgtcgaggcccaggaccccgctgccaaggaggaggatgacttttcgctgcgacgattcctgcgtgcccgggaccacaacatcggcaaggcgtcggccatgctcctccagtacctttcctggaggcgtgttgccaagccccatggctccatctcgggcgacgaggtgcgcgaacgagatttgcaaaggataagagtccgcatgcaagggcttcnaaccgtctcnatccgccccatngngtatctcctattgggggcacgaaaatttcccctgccccgggngtgacccttt

SEQ ID NO: 74 - protein, 89 aa, Triticum aestivum
  UNSURE (2)
MXYSTEDEHQHGHGYGDGDDAAEWKKVAELRAVVEAQDPAAKEEDDFSLRRFLRARDHNIGKASAMLLQYLSWRRVAKPHGSISGDEVR

SEQ ID NO: 75 - DNA, 541 bp, Triticum aestivum
  unsure (356)
  unsure (377)
  unsure (438)
  unsure (502)
gcgctatgtggtctatgtttttgacaaaatctgcaccaagctgccggcagggcaggagaagtttgcggcggtgatagacctgaagggatgggggtatgcaaactgcgacatccgtgggtacctggcagggctggacatcatgcagagctattacccagagcggctgggccgcgtgttcctgatccacgtgccctacctattcatggctgcgtggaagattgtgtaccccttaatcgatgacaagaccaagaagaatttgtgttcgtcgctgatagggaccttgacgccacacttcgagacgccatcgacgagtcccagctccctgaaggagtacggtgggcaagctcaagctctangcctacaacagttcaccatcngtccaatccatctgatgatcaatcgatagtgatgacatgtgacatatgcaaataagttgcngctccgacgaagcagcccgagagaagcgacgatccttgcaagtgtggcagtcgctcacactcanctacttatgtaatttttttacaaaaaaattgggggactc

SEQ ID NO: 76 - protein, 109 aa, Triticum aestivum
RYVVYVFDKICTKLPAGQEKFAAVIDLKGWGYANCDIRGYLAGLDIMQSYYPERLGRVFLIHVPYLFMAAWKIVYPLIDDKTKEEFVFVADRDLDATLRDAIDESQLPE

SEQ ID NO: 77 - DNA, 524 bp, Triticum aestivum
  unsure (357)
  unsure (364)
  unsure (411)
  unsure (423)
  unsure (429)
  unsure (436)
  unsure (448)
  unsure (459)..(460)
  unsure (463)
  unsure (469)
  unsure (484)
  unsure (486)..(487)
  unsure (507)
  unsure (519)
ggtactgatgagcgccaatatggccatggcggtgacggcgacgcggcggagtggaagaaggtggcggagctcagggagttcgttgaggcacaggacccctctgccaaggaggaggatgacttcgcgctgcggcggttcctgcgcgcccgggaccacaacatcaacaaggcatcggtgatgcttctccggtatcttgcctggaagcgtgtcaccaagccccatggcttcatctccgacgacaaggtgcgtggcgaagatcgcaaagggaaagagaccgccaccaaggttttgaccgtcttggtcgccccatgtcatatctctatggtgggcgccacttccctgtccggggtgatcacnaagattnaagcgctatgttgtccaatgttttttgacaaaaatcctgcaaccaancttcccggcaangggaangaaaaantttgcgggggtnaataaaacctnnaanggaatngggggtatgcaaatngnnaaatccttgggttacctggnaagggctggganataat

SEQ ID NO: 78 - protein, 76 aa, Triticum aestivum
GGDGDAAEWKKVAELREFVEAQDPSAKEEDDFALRRFLRARDHNINKASVMLLRYLAWKRVTKPHGFISDDKVRGE

SEQ ID NO: 79 - DNA, 542 bp, Zea mays
ttcggagagagagagaggagtgggagacccgcgagaggctgccgtgtagggaccgtagactcagcgactgcgaaggagggataaggggatggccgggatcggaccgatcaggcaggactgggagccggtcgttgtgcggaagaaggcacccaccgccgccgccaagaaggatgagaaggccgtcaacgccgcgcgccgcgccggtgcggagatcgataccatgaagaagtacaacgctggtacgaacaaggcggcatccagcggtacatccctcaacaccaagcgcctcgacgacgacaccgaaaacctcgcccatgagcgagttccaagtgatctgaagaagaatctcatgcaagcaaggctcgataagaagctgacacaggcacaacttgctcagatgataaatgagaagccacaggtgattcaggagtatgaatcaggcaaggcaatccccaaccagcagatcattagcaagctcgagagggccctgggaaccaagttgcgtgcaaggaaatagcttttctacgagtttggtcccggac

SEQ ID NO: 80 - protein, 142 aa, Zea mays
MAGIGPIRQDWEPVVVRKKAPTAAAKKDEKAVNAARRAGAEIDTMKKYNAGTNKAASSGTSLNTKRLDDDTENLAHERVPSDLKKNLMQARLDKKLTQAQLAQMINEKPQVIQEYESGKAIPNQQIISKLERALGTKLRARK

SEQ ID NO: 81 - DNA, 565 bp, Oryza sativa
  unsure (442)
  unsure (487)
gttctaaccagaaccttctcttcttccttgttcgttcatcccctaaccctttctttgttcatcttgttcttcctcttgtcgtctcgtcgagatggccgggattggtccgatcaggcaggactgggagccggtggtggtgcggaagaaggcgcccaccgccgccgccaagaaggatgagaaggccgtcaacgccgcccgccgctccggcgccgagatcgagaccatgaagaagtataacgctggaacaaacaaggcggcgtccagtggcacatccctcaacaccaagcggctggatgacgacaccgagagccttgcccatgagcgtgtctcaagtgacctgaagaaaaactcatgcaagcaaggctgggacaagaagatgacccaggcacagcttgcacagatgatcaatgagaagccccaggtgatccaggagtacgatcangtaaactatccgaacagcagtatcgggaagctgaaaggccttggnacaaactcgcggcaagaaataatgtcacaataggcctgaagcatatgttgggcaacaaagccaaaatgttgctaccat

SEQ ID NO: 82 - protein, 142 aa, Oryza sativa
  UNSURE (117)
MAGIGPIRQDWEPVVVRKKAPTAAAKKDEKAVNAARRSGAEIETMKKYNAGTNKAASSGTSLNTKRLDDDTESLAHERVSSDLKKNSCKQGWDKKMTQAQLAQMINEKPQVIQEYDXVNYPNSSIGKLKGLGTNSRQEIMSQ

SEQ ID NO: 83 - DNA, 528 bp, Glycine max
  unsure (503)
  unsure (521)
  unsure (525)
  unsure (527)
aagaaccctagacagtcacagaaccattccatagaaatgtcaggtgttggccctctttctcaagattgggaacccgtcgtcctccgcaagaaggctcccactgccgccgccaagaaggatgagaaagccgtcaacgccgcccgccgctccggcgccgaaatcgaaaccctaaaaaaatataatgctgggacaaataaagcagcatctagcagcacttcattgaacactaagaggctggatgatgatactgagagtctagctcatgagaaggtaccaactgaacttaagaaggccataatgcaagctaggatggacaagaaacttactcagtctcagcttgctcaactgatcaatgagaagcctcaagtgatccaggagtacgagtcaggaaaggccattccaaaccagcagataattggcaagttggaaagagcccttggagctaaattgcgtggcaagaaataagggacttaatgtcatgttgcgcgtttattttgctatgntggtcaactatgggggtnttananc

SEQ ID NO: 84 - protein, 142 aa, Glycine max
MSGVGPLSQDWEPVVLRKKAPTAAAKKDEKAVNAARRSGAEIETLKKYNAGTNKAASSSTSLNTKRLDDDTESLAHEKVPTELKKAIMQARMDKKLTQSQLAQLINEKPQVIQEYESGKAIPNQQIIGKLERALGAKLRGKK

SEQ ID NO: 85 - DNA, 624 bp, Triticum aestivum
  unsure (512)
  unsure (612)
tgtgaactcgagagaccgagcgaggaaagttgccgtgtgagacctgagagtcagggagatatggctgggattggtcctatcaggcaggactgggagccgatagtggtgcggaagaaggcgcagaacgccgccgacaagaaggacgaaaaggccgtcaacgctgcccgccgctccggcgccgagatcgacaccaccaagaagtacaacgctggaacgaacaaggctgcatctagcggaacttccctcaacaccaagcggctcgacgacgacaccgagaacctttcccatgagcgtgtttcaagtgacctgaagaaaaaccttatgcaagcaagactggataagaagatgacccaggcacaacttgctcagatgatcaatgagaagccacaggtgatccaggagtacgagtcgggcaaggcgattccgaacaatcagataattggaaagctcgagagggcacttggagctaagctgcgtagcaagaagtaatgccttgaaggcaagccctgtcnattgccttacactgcatttgctagtcctaaaagctcctacaggctgtttctgttgggttgatactgaataactatgcacagaacgactttagtatcatanatccctgttcca

SEQ ID NO: 86 - protein, 142 aa, Triticum aestivum
MAGIGPIRQDWEPIVVRKKAQNAADKKDEKAVNAARRSGAEIDTTKKYNAGTNKAASSGTSLNTKRLDDDTENLSHERVSSDLKKNLMQARLDKKMTQAQLAQMINEKPQVIQEYESGKAIPNNQIIGKLERALGAKLRSKK

SEQ ID NO: 87 - DNA, 666 bp, Zea mays
  unsure (10)
  unsure (25)
  unsure (45)
  unsure (53)
  unsure (78)
  unsure (86)
  unsure (120)
  unsure (155)
  unsure (663)
cacaaggaanaacttcaagatgaanatcacatgaaatcactgggnctacaggnctcatcaccaggatatgacaggcangttgttgntgaccatgcaaataatcttgcatctaaaatccgnagcaacttgactaattcaatgaaagctctgggtgnggatatactcactggtattggaaccattgtggggaagcaaaaagtgagatatgggaaagttggtttcccagacaatgaaatcactgctagaaacatcataattgccactggatctgttccttttgtccccaagggcattgaaatagatggtaaaactgtatttactagtgatcatgcactaaaacttgagtcagtccctgaatggattgctattgttggaagtggttacattggacttgaattcagtgatgtatacacagctctaggaagtgaggttacttttgttgaagctcttgatcaattaatgcctgggtttgatcccgagattgcaaaattggcgcagaggattcttattagtcctcgtaaaattgactatcacactggtgtttttgcaagcaagattaccccagcaaaggatggtaagcctgttttgattgagctgattgatgctaaaacaaaagaacacaaggagacacttgaggtggatgcagcactcatagctactggnaag

SEQ ID NO: 88 - protein, 222 aa, Zea mays
  UNSURE (4)
  UNSURE (9)
  UNSURE (18)
  UNSURE (26)
  UNSURE (29)
  UNSURE (52)
HKEXLQDEXHMKSLGLQXSSPGYDRXVVXDHANNLASKIRSNLTNSMKALGXDILTGIGTIVGKQKVRYGKVGFPDNEITARNIIIATGSVPFVPKGIEIDGKTVFTSDHALKLESVPEWIAIVGSGYIGLEFSDVYTALGSEVTFVEALDQLMPGFDPEIAKLAQRILISPRKIDYHTGVFASKITPAKDGKPVLIELIDAKTKEHKETLEVDAALIATGK

SEQ ID NO: 89 - DNA, 979 bp, Zea mays
  unsure (932)
  unsure (935)
  unsure (937)
  unsure (951)
  unsure (958)
cataaacccctcctcgcctcctccgcccgagcctgcctcctcatcgacttatacgcctccttctcttaactcgacgcactagcctcagccaattgtcgcatttcgtcgctatgggtccacagcggccgtctccgtctccgcctcggcgatcgcgtcccgcggctgcgccagatccgaggctgcgcggcggccaggtggaatccgggtctgcggactcggagcgaggccctcacgtgtcactcgcttcggatctcgcaggcgcccgcgaggctgatggtgacgaggccgccgccgccggcggcggcgaccaatggcgcggcggcggggactgcgggttcgactacgatctcgtcatcatcggcgcgggcgtcgggggtcacggcgccgcgctgcacgccgttgaagagggcttaaaaacagcaataattgagggagatgttgtgggtgggacttgtgtaaacagaggctgtgtcccatcgaaagcgcttcttgctgtcagcggtcgaatgcgggagcttcatgatgaacatcatatgaagtctttgggtctacaggtttcctctcctggatatgacagacaagctgttgctgatcatgcaaacaatcttgcctcgaaaatccgtatcaacttgactaactcaatgaaagctctaggagtggatatattgacaggtgttggcactattgtgggaaagcaaaaggtacgatatggaaaagctggtttcccagataaagaaatcactgccaggaacatcataatcgccactggttcagttccttttgttccgaaagggattgagattgatgggaaaactgtatttactagtgatcatgccctgaaacttgaattcagttcccaaactgggatagctttttgttggaaattggttacatttggacttgaatttcattgaattttaccaactcttggnaantnaaggttacttttgnttgaaanctcttgaacaagcttgaatgc

SEQ ID NO: 90 - protein, 250 aa, Zea mays
MGPQRPSPSPPRRSRPAAAPDPRLRGGQVESGSADSERGPHVSLASDLAGAREADGDEAAAAGGGDQWRGGGDCGFDYDLVIIGAGVGGHGAALHAVEEGLKTAIIEGDVVGGTCVNRGCVPSKALLAVSGRMRELHDEHHMKSLGLQVSSPGYDRQAVADHANNLASKIRINLTNSMKALGVDILTGVGTIVGKQKVRYGKAGFPDKEITARNIIIATGSVPFVPKGIEIDGKTVFTSDHALKLEFSSQ

SEQ ID NO: 91 - DNA, 2186 bp, Zea mays
gcacgagcataaacccctcctcgcctcctccgcccgagcctgcctcctcatcgacttatacgcctccttctcttaactcgacgcactagcctcagccaattgtcgcatttcgtcgctatggggtccacagcggccgtctccgtctccgcctcggcgatcgcgtcccgcggctgcgccagatccgaggctgcgcggcggccaggtggaatccgggtctgcggactccggagcgaggtcctcacgtgtcactcgcttcggatctcgcaggcgcccgcgaggctgacggtggcgaggccgccgccgccggcggcggcgaccaatggcgcggcggcggggacctgcgggttcgactacgatctcgtcatcatcggcgcgggcgtcgggggtcacggcgccgcgctgcacgccgttgaagagggcttaaaaacagcaataattgagggagatgttgtgggtgggacttgtgtaaacagaggctgtgtcccatcgaaagcgcttcttgctgtcagcggtcgaatgcgggagcttcatgatgaacatcatatgaagtctttgggtctacaggtttcctctcctggatatgacagacaagctgttgctgatcatgcaaacaatcttgcctcgaaaatccgtatgaacttgactaactcaatgaaagctctaggagtggatatattgacaggtgttggcactattgtgggaaagcaaaaagtacgatatggaaaagctggtttcccagataaagaaatcactgccaggaacatcataattgccactggttcagttccttttgttccgaaagggattgagattgatgggaaaactgtatttactagtgatcatgcactgaaacttgagtcagttccagactggatagctattgttggaagtggttacattggacttgagttcagtgatgtatacacagctcttggaagtgaggttacttttgttgaagctcttgaccagctgatgcctggatttgatcctgaaattgcaaaattagcccagagagttcttatcaatcctcggaaaattgactatcacactggtgtttttgcaagcaagattactcctgcaaaggatgggaaacctgtgctcatcgagcttattgatgcaaagacaaaggagcacaaagaaacccttgaggttgacgcagcccttatagctacaggaagggcgccattcaccaaagggcttggcttggaaaacatcaatgttgttacacaacgtggttttgtgcctgttgatgaacggatgcgagtcatggatgcagatggcaatgtggtacccaatttatattgcattggagatgccaatggcaagctcatgcttgcccatgctgccagtgcacaaggaatttcagttgttgaacaaatctctggaaaggatcacatcctaaatcatttaagcatcccagcagcatgtttcacccatccagagattagtatggttggactgacagagccacaagccagagagaaggcagataaagaaggatttgaggtaaatgttgtgaagactagctttaaggctaacactaaagctttggcagaaaatgaaggagatgggattgctaagttgatttaccgacctgacacgggtgaaattcttggggttcacattttgggtttgcatgctgctgatctcattcacgaggcatcaaatgccatcgccctaggaactcgtgtgcaagacatcaagtttgctgttcacgcacaccctacattgtctgaggtcctggatgaactcttcaaagcagccaaggttaattccggtgtttctcattctgtaaatgaaccagttgcagcctagagaaaggccggatagcaagccaaggcagccaccccaaccactcctgaaggtcctcagcttcgtcacgaccctgttttcttccccaaaacgagattgacaacggtaacggggagggtgttgttgtaggcagttgctgtaggttacaaatttgaggaagaaattcatcagtgaatacaagcacacaaatgtttcttttttgggtccagattgttaaaagggtcttttttttgacggtggggtgggtttttgttggcttcgttatttgcatatttgttgttggttgccctgtaagatgaagtgccgaggctagctcagctagtttgaaataattcatgtttcaaaaaaaaaaaaaaaaaaaaaaaaaaaaaaaa

SEQ ID NO: 92 - protein, 565 aa, Zea mays
MGSTAAVSVSASAIASRGCARSEAARRPGGIRVCGLRSEVLTCHSLRISQAPARLTVARPPPPAAATNGAAAGTCGFDYDLVIIGAGVGGHGAALHAVEEGLKTAIIEGDVVGGTCVNRGCVPSKALLAVSGRMRELHDEHHMKSLGLQVSSPGYDRQAVADHANNLASKIRMNLTNSMKALGVDILTGVGTIVGKQKVRYGKAGFPDKEITARNIIIATGSVPFVPKGIEIDGKTVFTSDHALKLESVPDWIAIVGSGYIGLEFSDVYTALGSEVTFVEALDQLMPGFDPEIAKLAQRVLINPRKIDYHTGVFASKITPAKDGKPVLIELIDAKTKEHKETLEVDAALIATGRAPFTKGLGLENINVVTQRGFVPVDERMRVMDADGNVVPNLYCIGDANGKLMLAHAASAQGISVVEQISGKDHILNHLSIPAACFTHPEISMVGLTEPQAREKADKEGFEVNVVKTSFKANTKALAENEGDGIAKLIYRPDTGEILGVHILGLHAADLIHEASNAIALGTRVQDIKFAVHAHPTLSEVLDELFKAAKVNSGVSHSVNEPVAA

SEQ ID NO: 93 - DNA, 878 bp, Zea mays
  unsure (734)
  unsure (744)
  unsure (819)
  unsure (867)
gattactcctgcaaaggatggaaaacctgtgctcatcgagcttattgatgcaaagacaaaggagcacaaagaaacccttgaggttgacgcagcccttatagctacaggaagggcgccattcaccaaagggcttggcttggaaaacatcaatgttgttacacaacgtggttttgtgcctgttgatgaacggatgcgagtcatggatgcaggtggcaatgtggtacccaatttatattgcattggagatgccaatggcaagctcatgcttgcccatgctgccagtgcacaaggaatttcagttgttgaacaaatctctggaaaggatcacatcctaaatcatttaagcatcccagcagcatgtttcacccatccagagattagtatggttggattgacagagccacaagccagagagaaggcagataaagaaggatttgaggtaaatgttgtgaagactagctttaaggctaacactaaagctttggcagaaaatgaaggagatgggattgctaagttgatttaccgacctgacacgggtgaaattcttggggttcacattttgggtttgcatgctgctgatctcattcacgaggcatcaaatgccatcgccctaggaactcgtgtgcaagacatcaagtttgctgttcacgcacaccctacattgtctgaggtcctggatgaactcttcaaagcagcaagttaattccggtgttctcattctgtaaatgaaccanttcagcctanagaaaggcggtacaagccaaggaagcacccaaacaccctgaagtcccagttctcacgacctgtttctcccaaaanagattgcaacgtacgggaaggtgttgttgtagcagtgcgtagtacaanttgggaaaatc

SEQ ID NO: 94 - protein, 233 aa, Zea mays
ITPAKDGKPVLIELIDAKTKEHKETLEVDAALIATGRAPFTKGLGLENINVVTQRGFVPVDERMRVMDAGGNVVPNLYCIGDANGKLMLAHAASAQGISVVEQISGKDHILNHLSIPAACFTHPEISMVGLTEPQAREKADKEGFEVNVVKTSFKANTKALAENEGDGIAKLIYRPDTGEILGVHILGLHAADLIHEASNAIALGTRVQDIKFAVHAHPTLSEVLDELFKAAS

SEQ ID NO: 95 - DNA, 529 bp, Oryza sativa
  unsure (276)
tgtatccaggtttcaacagctggatatgataggcaggctgttgcagatcatgcaaataatctggcctctaaaattcgtagcaacttgactaattcgatgaaagctttgggtgtggatatattgactggttttggcaccattgtgggaaaacaaaaagtgagatatggaaaagttggttttcctgacaatgaaatcactgccagaaatatcattattgcaacggggtctgttccttttgtccccaatggcatcgaaatagatggaaaatatgtgttngcatatgcacattcactagttcttacagagctcgctgaatggttttatgcaggtaaaaccgtatttactagtgatcatgcactaaaacttgagtcagttcctgactggattgctatcgtgggaagcggttacattggactggaattcagtgatgtatacacggctctgggaagtgaggtggatgcagctctcatagctaccgggaagggcaccgttcaacaaagggcttggcttggaaaagtcaacgtgtaca

SEQ ID NO: 96 - protein, 176 aa, Oryza sativa
  UNSURE (92)
CIQVSTAGYDRQAVADHANNLASKIRSNLTNSMKALGVDILTGFGTIVGKQKVRYGKVGFPDNEITARNIIIATGSVPFVPNGIEIDGKYVXAYAHSLVLTELAEWFYAGKTVFTSDHALKLESVPDWIAIVGSGYIGLEFSDVYTALGSEVDAALIATGKGTVQQRAWLGKVNVY

SEQ ID NO: 97 - DNA, 1556 bp, Oryza sativa
  unsure (721)
gcacgagtgtatccaggtttcaacagctggatatgataggcaggctgttgcagatcatgcaaataatctggcctctaaaattcgtagcaacttgactaattcgatgaaagctttgggtgtggatatattgactggttttggcaccattgtgggaaaacaaaaagtgagatatggaaaagttggttttcctgacaatgaaatcactgccagaaatatcattattgcaacggggtctgttccttttgtccccaatggcatcgaaatagatggaaaatatgttaaaaccgtatttactagtgatcatgcactaaaacttgagtcagttcctgactggattgctatcgtgggaagcggttacattggactggaattcagtgatgtatacacggctctgggaagtgaggtggatgcagctctcatagctaccggaagggcaccgttcaccaaagggcttggcttggaaaatgtcaacgttgttacacaacgcggttttgttcctgttgatgagcggatgcaagttatggacgcagatggcaatgcggttccaaatttgtattgtattggagatgccaatggcaaactcatgctggctcatgctgccagtgcacaaggaatctcagttgttgagcgaatctctgggaaagacaacatcctaaatcatctaagcatcccggctgcctgtttcactcatccggagattagtatggttgggctaacaganccacaagcgagagaaaaggctgataaggaaggatttgagataagtgttgttaagaccagcttcaaggcaaacacgaaggctctggctgagaatgaaggagatggacttgctaagatgatttaccggcctgacactggagaaattcttggagttcacatattaggtttgcatgctgctgacctcatccacgaggcatcaaacgccattgccctcggaactcgtgtacaagacatcaagtttgctgttcatgcacacccaactttgtctgaggttctggatgagctcttcaaagctgccaaggttaatgcaggtgttcctcattccgtaaatgagcccgtcgcagcctagagaggaacatcatctgggatagcccccctcttggatgtccttgattcctagttactggcaagtgtaattcggtaattcctgatgagatccaccagttagtgctgagatatctaattactgcggaaaaagagaggaactactgatgagatccaccagttagtgctgagatatctagttaccgcggaaaagagaggaactactgcgtcgttctatgtatgatgtatcacatatacataacagttttgcagcttatgtagagttcatccgtacagtgctttcacatgtcgtcgtcttttcccctgtctaatagtagcttgattagcttgctcagttttctatccgacaaacacctactcttgcttgctttggagcagcatcaacaggccaaggcatgatggaaatgcttctatagttgtggttgaacaggtaagttcaataaacagagcaatgaagttttgaaaggcattcctggagctagtggtggcaa

SEQ ID NO: 98 - protein, 353 aa, Oryza sativa
  UNSURE (238)
CIQVSTAGYDRQAVADHANNLASKIRSNLTNSMKALGVDILTGFGTIVGKQKVRYGKVGFPDNEITARNIIIATGSVPFVPNGIEIDGKYVKTVFTSDHALKLESVPDWIAIVGSGYIGLEFSDVYTALGSEVDAALIATGRAPFTKGLGLENVNVVTQRGFVPVDERMQVMDADGNAVPNLYCIGDANGKLMLAHAASAQGISVVERISGKDNILNHLSIPAACFTHPEISMVGLTXPQAREKADKEGFEISVVKTSFKANTKALAENEGDGLAKMIYRPDTGEILGVHILGLHAADLIHEASNAIALGTRVQDIKFAVHAHPTLSEVLDELFKAAKVNAGVPHSVNEPVAA

SEQ ID NO: 99 - DNA, 514 bp, Glycine max
  unsure (456)
  unsure (478)
  unsure (509)
tacacatctccacttcaccattttccatttccctctccctccaaaaatgcattcctcgctctctctctcgttctccgccacttcctcctccgtcgccactgtttccagatcacgccactcattccactctcccgccgccgccatgcctctcaatctccgcttctgcggcttgaggcgcgatgcatttggttcaggtctcgctgcttctctcaaccgctaccactcccacctccctcgccgccctcactccgccgcagtctctgccgcgctatctagcaatggaagccctcccaaatcgtttgactacgatttgctgataatcggcgccggcgttggcggccacggcgccgcgcttcatgccgttgagaagggtttgaaaacagccattgtggaaggagatgtggtgggagggacatgtgtgaacaaaaggctgtgttccttcaaaagctcttttanccgtgagtgggtcgtatgcganaactaaaggagcgattatcacttgaagtccntttgg

SEQ ID NO: 100 - protein, 295 aa, Glycine max
  UNSURE (256)
MHSSLSLSFSATSSSVATVSRSRHSFHSPAAAMPLNLRFCGLRRDAFGSGLAASLNRYHSHLPRRPHSAAVSAALSSNGSPPKSFDYDLLIIGAGVGGHGAALHAVEKGLKTAIVEGDVVGGTCVNKGCVPSKALLAVSGRMRELKSDHHLKSFGLQVSAAGYDRQGVADHANNLASKIRNNLTNSMKALGVDILTGFGTILGPQKVKVGSSDKIVTAKDIIIATGSVPFVPKGIEIDGKTVITSDHALKLESVPXLVAIVGSGYIGLGISDVYTALGSEVTFIEALDQLMPGFE

SEQ ID NO: 101 - DNA, 2273 bp, Glycine max
gcacgagtacacatctccacttcaccattttccatttccctctccctccaaaaatgcattcctcgctctctctctcgttctccgccacttcctcctccgtcgccactgtttccagatcacgccactcattccactctcccgccgccgccatgcctctcaatctccgcttctgcggcttgaggcgcgatgcatttggttcaggtctcgctgcttctctcaaccgctaccactcccacctccctcgccgccctcactccgccgcagtctctgccgcgctatctagcaatggaagccctcccaaatcgtttgactacgatttgctgataatcggcgccggcgttggcggccacggcgccgcgcttcatgccgttgagaagggtttgaaaacagccattgtggaaggagatgtggtgggagggacatgtgtgaacagaggctgtgttccttccaaagctcttttagccgtgagtggtcgtatgcgagaactaaggagcgatcatcacttgaagtcctttggcttacaggtttctgctgctggctatgacagacaaggagtcgctgatcatgctaataaccttgcttcgaaaatccgtaataatttgaccaactcaatgaaagcacttggagtagacatacttactggttttggaactattctgggtcctcaaaaggtgaaagttggctcttcagacaaaatagtaactgcaaaaaatatcatcattgctactggttctgttccttttgttcctaagggcattgaaattgatgggaagactgtgattaccagtgaccacgcactcaaactggagtctgttcctgattggatagcaattgtaggaagtggatatattggtcttgaattcagtgatgtatatacagcacttggaagtgaggttacttttatagaagctttagatcaacttatgcctggatttgatcctgaaattagcaagttggctcagagggtccttataaatccccggaatattgactatcatactggagtttttgcaaccaagatcacgcctgcaagggatggaaaacctgtcttgattgaacttattgatgcgaaaaccaaggagccgaaagacacgctggaggtggatgctgcactaatagcaactggaagggctccgttcacacaaggtcttggattggagaatattgatgtggtaacacagcgtggttttgttccagtggatgagcacatgcgagtaattgatgcgaatggcaagctggtgcctcatttatattgtattggtgatgcaaatggcaagatgatgcttgctcatgctgccagtgcacaaggaatttcagtggttgaacaagtcactggaaaagatcacgtgctcaatcatttaagcatcccagctgcttgtttcactcatcctgaacttagcatggttggattaacagagcctcaagcaagggtgaaaggtgaaaaagaggggtttgaagtaagtgttgccaaaacaagttttaaagctaacacaaaggctctagcagaaaacgaaggagagggactagccaagttgatatacagacctgacaatggagagatactaggagttcatatttttggtttgcatgcagcagatctcatccatgaagcatccaatgcaatagcattagggacacatattcaggacataaaatttgccgttcatgcacatccaactttgtccgaggttcttgatgaactattcaaatcagcaaaggttaaagcacaagcttctagcccagtaagtgaaccagttgcagtctaatcttcccaaacaaagtataaaattttgaagaaatttacgtgtactagggacttccaaaatattcatcttcaggaggaacacacaaacacattcagaatcctgtaaaagaggggaaccgtttgagggaaatcaagaatgacctgattatggataaccgccgaagcttacatgtaatggtttcttttctacttgatattcttagcgccagtcaaagatgcttatcttcattattgcattttttaaactatagtcaatgagaaggcctctgacagcggcctatttttttagagtgctactagttttgcaccgaacacgtatgtaccattaaacagttttccttcagagatgatgaaattatgcttgtcgacagacctttgggttcaatacgtaatacgtaaaggttcgaaattgttttgggtggaagttttttcccttaaaaaaaaaaaaaaaaaaaaaaaaaaaaaaaaaaaaaaaaaaaaaaaaaaaaaaaaaaaaaaaaaaaaaaaa

SEQ ID NO: 102 - protein, 570 aa, Glycine max
MHSSLSLSFSATSSSVATVSRSRHSFHSPAAAMPLNLRFCGLRRDAFGSGLAASLNRYHSHLPRRPHSAAVSAALSSNGSPPKSFDYDLLIIGAGVGGHGAALHAVEKGLKTAIVEGDVVGGTCVNRGCVPSKALLAVSGRMRELRSDHHLKSFGLQVSAAGYDRQGVADHANNLASKIRNNLTNSMKALGVDILTGFGTILGPQKVKVGSSDKIVTAKNIIIATGSVPFVPKGIEIDGKTVITSDHALKLESVPDWIAIVGSGYIGLEFSDVYTALGSEVTFIEALDQLMPGFDPEISKLAQRVLINPRNIDYHTGVFATKITPARDGKPVLIELIDAKTKEPKDTLEVDAALIATGRAPFTQGLGLENIDVVTQRGFVPVDEHMRVIDANGKLVPHLYCIGDANGKMMLAHAASAQGISVVEQVTGKDHVLNHLSIPAACFTHPELSMVGLTEPQARVKGEKEGFEVSVAKTSFKANTKALAENEGEGLAKLIYRPDNGEILGVHIFGLHAADLIHEASNAIALGTHIQDIKFAVHAHPTLSEVLDELFKSAKVKAQASSPVSEPVAV

SEQ ID NO: 103 - DNA, 1208 bp, Triticum aestivum
  unsure (932)
  unsure (1043)
  unsure (1080)
  unsure (1114)
  unsure (1142)
  unsure (1160)
  unsure (1163)
  unsure (1168)
  unsure (1177)
  unsure (1196)
  unsure (1203)
  unsure (1206)
gcaaaattgtgggaaagcaaaaggtacgatatggaaaagtaggttttccagaaaaagaaatcactgcaaagaacatcatcattgccactggatcagttccttttgttcccaagggcatagaaattgacggcaagactgtatttactagtgatcatgcattaaaacttgaatcagttccggactggatagctattgttggaagtggttatattggacttgaattcagcgatgtgtacacagctctaggaagcgaggttacctttgttgaagctcttgaccagctgatgcctggttttgatcctgcaatcgcaaaattggctcagagagtccttatcaatccaaggaaaattgactatcacactggtgtttttgcaagcaagattactccggcaaaggatggaaagcctgtgttgattgaactcattgatgccaaaacgaaggaacacaaagaaccttgaggtggatgcagcccttatagccactggaagagcaccattcaccaacggacttggcttggaaaatattaatgttgttacacagcgtgggttttatcctgttgatgagcggatgcaatcaacggatgctgatggcaatgtggtgccgaatttattttgcattggagatgcgaatggtaaactcatgcttgcccatgctgccagtgcacagggaatctcagtcgttgagcaaatctctgggagggaccacattctaaaccatttaagcatcccagctgcttgtttcactcatccagaaatcagtatggttgggctgacagagccgcaagccagagaaaaggctgataacgaaggatttgaagtaagtgttgttaagaccagctttaaggccaacacaaaagctttggcagaaaatgaaggcgacggaattgctaagatgatctaccgacctgacacgggagaattcttgggtgtcanatcttgggtttcatgctgctgactcatcaacaaggatcaaatgcattgccctaggaccgtttgcaagaactaagcttgctgtcatcacaccaacgttgtccgaaatcctcnaacgaactcctcaaagcggcaaggtaatcaagggtcnccatccgtaaataacaattcaactaaagacggangacgcagcaatcatcaaccaaccgtctnaaggtctaattcacacanccngaatnccaacctancataaggactttcaccgcngggcaanaanga

SEQ ID NO: 104 - protein, 308 aa, Triticum aestivum
KIVGKQKVRYGKVGFPEKEITAKNIIIATGSVPFVPKGIEIDGKTVFTSDHALKLESVPDWIAIVGSGYIGLEFSDVYTALGSEVTFVEALDQLMPGFDPAIAKLAQRVLINPRKIDYHTGVFASKITPAKDGKPVLIELIDAKTKEHKNLEVDAALIATGRAPFTNGLGLENINVVTQRGFYPVDERMQSTDADGNVVPNLFCIGDANGKLMLAHAASAQGISVVEQISGRDHILNHLSIPAACFTHPEISMVGLTEPQAREKADNEGFEVSVVKTSFKANTKALAENEGDGIAKMIYRPDTGEFLG

SEQ ID NO: 105 - DNA, 466 bp, Typha latifolia
cttccatcctgcaataaataacccgaccaaatcttttcctctcatccctcatctctaaatcgaacctctaatcaaacaaagaaaagaagcaaaaagatggagagctccttgaagtcggcggcgcttttggagcagatgaagctccacctcaaaaccgacgccggcaaagacatcaccaaaaagatcggcctcgtctaccaactcaacatcgctcccaagaaaattggggtggatgaggagatcttcgtcgtcgatctcaaagaaggcaaagtcaccaaaggtccttacgaagggaagcccgacgccacgttctcgttcacggatagcgatttcctctcaattgcgactgggaagatgaatccgcaaatggcgtttattagaggtgcgatgaagattaagggaagcataggtgcggcaacaaagtttacgccgggatattttcctaagccttcgaagatgtagaaag

SEQ ID NO: 106 - protein, 121 aa, Typha latifolia
MESSLKSAALLEQMKLHLKTDAGKDITKKIGLVYQLNIAPKKIGVDEEIFVVDLKEGKVTKGPYEGKPDATFSFTDSDFLSIATGKMNPQMAFIRGAMKIKGSIGAATKFTPGYFPKPSKM

SEQ ID NO: 107 - DNA, 529 bp, Eucalyptus grandis
  unsure (458)
  unsure (463)
  unsure (475)
  unsure (489)
  unsure (508)
  unsure (516)
caccggcacatccccggtctctccccaagcgattctcgagccgagccggacgcggaagcaagcggccatggcgagcgactcgagcgcgacccagctcaaatccgacgccttgatggagcagatgaagcagcacctctccaccgacgccggcaaggcggtcaccaagaagatcggcctcgtctatcagatcaacatcgcccccaagaaaattgggttcgacgaggtggtctacatcgtcgatctgaagaagggagaggtcactaaaggaccatatgaaggtggaaaacctgatgctaccttttccttcaaagatgatgattttatcaaggttgccactggaaaaatgaatcctcaaattgcttttatgaggggagcaatgaagattaagggaagcctgagtgcagcgcagaaattcactcctgacatattcccaaagccatcgaagatgtgagcatttnaaaangggtcttcaatnctggggttttttangttcctcctggtttccggntgggaaanaaaaagggggaaa

SEQ ID NO: 108 - protein, 127 aa, Eucalyptus tereticornis
MASDSSATQLKSDALMEQMKQHLSTDAGKAVTKKIGLVYQINIAPKKIGFDEVVYIVDLKKGEVTKGPYEGGKPDATFSFKDDDFIKVATGKMNPQIAFMRGAMKIKGSLSAAQKFTPDIFPKPSKM

SEQ ID NO: 109 - DNA, 704 bp, Zea mays
  unsure (640)
  unsure (663)
  unsure (688)
  unsure (692)
  unsure (696)
ggctagatccagatccagatccagcaaccagcatgggccgtggcgtggcgtgcttgcagctgcagtcctgcacgtcttgccgctttgattgccttctccttcccgcaactactcatcctttccatcaaaactgagcaaacccctcatcctattctcgcgcccggcgtctcccttctccaacctccgtttctaatccgcgctgctaatcccactcccagtcccagctcttccgctgagatggacagtagcagcctcaaatccgcgcagctcctggagctgatgcgccagcacctggccaccgatgccggcaaggaggtcaccaagaaggtcggcctcgtctaccagctcaacatcgcccccaagaagatcggcgttgatgaggagatcttcgtggtcgacctcaagaagggcgaggtcaccaaagggccgtaccagggaaagccggatgccactttctccttcacggacaacgatttccttggaatcgccaccggcaagacgaatccgcagattgcattcattcgaggggcgattagatcaaaggggaacatcagtgcggcgcagaagttcaccctgacatcttcccaagctgctaagctgtaaaggttaattgggtaatacttggccaaggggaaaatangtttgaagcttaattacaagtanagatacatgagtggacataaaagangtcncggnggaaattg

SEQ ID NO: 110 - protein, 121 aa, Zea mays
MDSSSLKSAQLLELMRQHLATDAGKEVTKKVGLVYQLNIAPKKIGVDEEIFVVDLKKGEVTKGPYQGKPDATFSFTDNDFLGIATGKTNPQIAFIRGAIRSKGNISAAQKFTLTSSQAAKL

SEQ ID NO: 111 - DNA, 752 bp, Zea mays
gcacgagggcgtgcttgcagctgcagtcctgcacgtcttgccgctttgattgccttctccttcccgcaactactcatcctttccatcaaaactgagcaaacccctcatcctattctcgcgcccggcgtctcccttctccaacctccgtttctaatccgcgctgctaatcccactcccagtcccagctcgtccgctgagatggacagtagcagcctcaaatccgcgcagctcctggagctgatgcgccagcacctggccaccgatgccggcaaggaggtcaccaagaaggtcggcctcgtctaccagctcaacatcgcccccaagaagatcggcgttgatgaggagatcttcgtggtcgacctcaagaagggcgaggtcaccaaagggccgtaccagggaaagccggatgccactttctccttcacggacaacgatttccttggaatcgccaccggcaagacgaatccgcagattgcattcattcgaggggcgattaaaatcaaggggagcatcagtgcggcgcagaagttcacccctgacatcttccccaagcctgctaagctgtagaaggttagattgtgtattacttggtcgaggtgaataataatgtttgcaagcttcaattactatgtacgagatacaatgagtggaacatgaaaagcacgttctcggtgggaatttggatatggttgaacttccacttaaatcaagctcaatgttcgtttctcatgattaaaaaaaaaaaaaaaaaa

SEQ ID NO: 112 - protein, 122 aa, Zea mays
MDSSSLKSAQLLELMRQHLATDAGKEVTKKVGLVYQLNIAPKKIGVDEEIFVVDLKKGEVTKGPYQGKPDATFSFTDNDFLGIATGKTNPQIAFIRGAIKIKGSISAAQKFTPDIFPKPAKL

SEQ ID NO: 113 - DNA, 461 bp, Hevea brasiliensis
taccctcacctgacctccatatcaaattcaaatgctccaatcttccttgtaacactagaatttacactcttgttaagatcaatggctgcggagctcaagtctgaatccgtttttgatctcctcaagcgattcctcgagaccgacgagggtattgaacttagaaagaagatcaaccttgtctatcagttcaatatcgcccccaagaaaattgggatagatgaggtgtcatatactgttaatctcaagaaaggagaggttaataaaggcccatatgaaggaggcaagcctgatgccacattttccctcaaggatgaagattttgtcaagcttgctgagggaaaattgaatccccaaattgctttcatgaggggcactttgaagattaagggcaacctgagtgcagcgcaaaaattcactcctgacatcttcccaaagccgtcaaagctttgaagctattttag

SEQ ID NO: 114 - protein, 122 aa, Hevea brasiliensis
MAAELKSESVFDLLKRFLETDEGIELRKKINLVYQFNIAPKKIGIDEVSYTVNLKKGEVNKGPYEGGKPDATFSLKDEDFVKLAEGKLNPQIAFMRGTLKIKGNLSAAQKFTPDIFPKPSKL

SEQ ID NO: 115 - DNA, 626 bp, Oryza sativa
  unsure (493)
  unsure (578)
  unsure (582)
  unsure (590)
  unsure (592)
  unsure (602)..(603)
  unsure (614)..(615)
  unsure (619)
gccacttccccacaacgaggagaggaacagcagagcaaagccccacctcctcccctcctgcgcatctcctctcctccccggaatctgctctccgccgccgccgcccggcagaggagatggacggcagcagcctcaagtcggcgcagctcctcgagcagatgcgcctccacatggccaccgacgccggcaaggacatcgccaagaaggtcggcctcgtctaccagttcaacatcgcccccaagaaaatcggagtcgacgaggagatcttcgtcgtcgacctcaagaagggcgaggtcaccaaagggccgtacgaggggaagccagatgcgaccttctccttcacggattctgatttcctctcgatcgccacggggaagatgaacccacagatcgcgttcattcgaggcgcgataaagatcaaggggagcataagcgcggcgcaaaagttcaccccggatatcttccccaagccttccaaactgtagaaggttanaggtatattgtttgggcgaggttggtaataataaggggtttgctagttgcaatactgtgtttgatagaatgggggggagaaaaantggnaacaaggnanaacacacganntgcctggatgnnaatngcctggg

SEQ ID NO: 116 - protein, 122 aa, Oryza sativa
MDGSSLKSAQLLEQMRLHMATDAGKDIAKKVGLVYQFNIAPKKIGVDEEIFVVDLKKGEVTKGPYEGKPDATFSFTDSDFLSIATGKMNPQIAFIRGAIKIKGSISAAQKFTPDIFPKPSKL

SEQ ID NO: 117 - DNA, 547 bp, Glycine max
  unsure (454)
  unsure (457)
  unsure (492)
  unsure (506)..(507)
  unsure (522)..(523)
  unsure (529)
ccaaactgttaggtttcctttgtttggtgtgaagccatggctgattcttcttccaacctgaaatccgacgcgataatggagcagatgaagcaacacctcgccaccgacgctggcaaacaagtcaccaataaaattggactcgtttatcagtttcacattgctcctaagaaacttggattcgacgaggtcgtctacaccgttgatctcaagaaaggagaggtcaccaaagggtcatatgaaggaggaaagcctgatgcatctttttcgtttaaggatgaggactttgttaaggttgccttagggaagatgaatccgcagattgctttcatgaggggtgcgatgaagattaagggaagtttgagtgctgctcagaaatttactccggatatcttcccaaagccttctaagctgtgagctgagatttctgcaaactacctgcacaaagggttgctanaantatcctttggctgcaagtcaaacaaaaattagatnagcaatcatagtannatcaaaagctgaagnntaaaantaaatccttaagttaatg

SEQ ID NO: 118 - protein, 125 aa, Glycine max
MADSSSNLKSDAIMEQMKQHLATDSGKQVTKKIGLVYQIQIAPKKLGIDEVVYTVDLRKGEVTKGPYEGGKPDASFSFKDEDFVKVALGKMNPQIAFMRGAMKIKGSLSAAQKFTPDIFPKPSKL

SEQ ID NO: 119 - DNA, 531 bp, Vernonia mespilifolia
  unsure (422)
  unsure (528)
tttactcctaaaaccacctccatctccgccgacccgatggcatcgtctgatctgaaatccgccgccttgatggagcagatgaacacccatttctccaccgacgccggcaaagctctcaccaaaaagatcggccttgtttatcaaatcaatatcgctcccaagaaacttggattcaacgaagagatttacgttgtcgatttgaagaaaggagaggttacaaaaggcccatatgaaggaggaaaaccagatgccactttttctttcacagatgaggatttcttcaagattgctacagggaaaatgaatcctcaaattgctttcatgaggggtaaaatgaaggtgaagggaagtttgagtgcagcccagaaatttacaccaagaatctttcctaaaccctcaaagatgtaagctctaaaattggnttatttgaattggtggcatcatcaatgttaaagctagtgatgaattgataaattatcaacattttttaataagtttgtgatggtaatgatacattgttgcatgtanttt

SEQ ID NO: 120 - protein, 123 aa, Vernonia mespilifolia
MASSDLKSAALMEQMNTHFSTDAGKALTKKIGLVYQINIAPKKLGFNEEIYVVDLKKGEVTKGPYEGGKPDATFSFTDEDFFKIATGKMNPQIAFMRGKMKVKGSLSAAQKFTPRIFPKPSKM

SEQ ID NO: 121 - DNA, 472 bp, Triticum aestivum
  unsure (218)
  unsure (232)
  unsure (367)
  unsure (431)
ctcgtgccgaattcggcacgagcaaaaacgataaatttccctcctccgctgcatttgatgcaatcaataactctttcaagagctcagaggctgaccgaatcaaggccatcaaagaagccaagtcggtcttcgccttcaccctgaagaacaaggctggtgaaactgagagctggcatattgacctactgaaaaagggtgaggtggggaagggacttggngaatctcccacagncactctcaagatgtcggacgaagattttggcagattagtcaacgctactgaagacccacagaagttatttatgtcaggtagactaggggttgagggagatataatgaaggcaaccaaattgcggaatttattcanaaaatctcagcggtcaagtcaaaagttataatatgttgtcaaaataatttattcgggccgtagntaatttttaatacgattaagtgggctttcctcaagaaaaaa

SEQ ID NO: 122 - protein, 131 aa, Triticum aestivum
  UNSURE (77)
  UNSURE (122)
RAEFGTSKNDKFPSSAAFDAINNSFKSSEADRIKAIKEAKSVFAFTLKNKAGETESWHIDLLKKGEVGKGLGESPTXTLKMSDEDFGRLVNATEDPQKLFMSGRLGVEGDIMKATKLRNLFXKSQRSSQKL

SEQ ID NO: 123 - DNA, 642 bp, Triticum aestivum
  unsure (34)
  unsure (624)
ctcgtgccgaattcggcacgagcccagccgaggngactcccgtacctgcacgtctcccctcccctcccctcccatccccggtggttggagccattatagagagggcgaggagcatcatctcctacagtcccaagatccaaccccatctccagcctgccccctcccccagtccccaaatccgtagtcccgcgcgccgcgatggaggcgagcaagctcaaggcggccaggctcctggagcagatgagcgcccacctcgccaccgacgccggcaaggagatcgccaacaaggtcggcttcgtctaccagctcaacatctcgcccaagaagatgggcgtggacgaggagatcttcgtcgtggacctcaagaagggcgccgtctccacagggaagtacgaggggacgccggacgcggccttcaccttcaccgacgacgacttcctcgccatcgccagcggcaagctgaacccgcagatggcgtttataaggggcaagctgaagatcaaggggagcatcagcgccgcgcagaagttcacgccggacatcttccccaagccgtccaagttgtagaacgccggattgccgtgccttgcccagtgatcggttataaaagatcagttatgctcncgatggaaatttggtgtg

SEQ ID NO: 124 - protein, 122 aa, Triticum aestivum
MEASKLKAARLLEQMSAHLATDAGKEIANKVGFVYQLNISPKKMGVDEEIFVVDLKKGAVSTGKYEGTPDAAFTFTDDDFLAIASGKLNPQMAFIRGKLKIKGSISAAQKFTPDIFPKPSKL

SEQ ID NO: 125 - DNA, 766 bp, Picramnia pentandra
gcacgagaggaaacgaaaaagaatccgagccaaatatagtgatggcggagtcaagtcagctaaaatctgatgctctgttggagcagatgaagaagcacctttcctctgacgccggcaaggatctcattgagaagatcggtcttgtctatcagatcaatatcgctcccaagaaaatcggatacgatgaggttgtctatgtcgttaaccttaagaaaggagacgttaccaaagggccatatgaaggtggaaagcctgatgccaccttttccttcaaggatgatgattttgttaaggttgccactggcaagatgaatcctcagatggctttcatgaggggtgccatgaagattaagggcagtatgactgcagctcagaagtttactcctgaaattttccctaagccctcgaagatgtgagcacaattcttacagaactgcctcacacaatgctgtttcagttgctatttattccaggccaaagtttaaattatgtattaggaaagtaaaaatcatcataaggtcaccaacattattttctgttggtttatggataatctttatgtagtttccaaaagaagttctaatcacaaacttgagaattcaatccaccctagttcattcataattgcataggcgatatgtaaatttgaatatttggttgttggaaaactgtctttcaagtgtaatgtttcgcaatgctcctttgttaatgaatgcggactgcttgttaaattgtgtaaaaaaaaaaaaaaaaaaaaaaaaaaaaa

SEQ ID NO: 126 - protein, 124 aa, Picramnia pentandra
MAESSQLKSDALLEQMKKHLSSDAGKDLIEKIGLVYQINIAPKKIGYDEVVYVVNLKKGDVTKGPYEGGKPDATFSFKDDDFVKVATGKMNPQMAFMRGAMKIKGSMTAAQKFTPEIFPKPSKM

SEQ ID NO: 127 - DNA, 880 bp, Zea mays
gcacgagcacgcgctgctttcagatatctcaccggaccgtcgtcgtcggcccctccgagaacataccaccgcgcccgccgccgcgcgcgccaccacgtccacgtacgccggccggccaccaagcaagcatggatacggtttcacagtccgagcacctgtgctacgtccgctgcacctactgcaacaccgtgctcgcggttggggttccatgcaagaggctcatggacacggtgactgtcaagtgcggccactgcaacaacctctcctacctcagtccacggccccccatggtgcagccgctctcgccgactgatcatcccttggggccattccagtgtcagggaccctgcagtgagtgcaggaggaaccaaccgctgccgctggcctcgccgacatcgactgacctcaccccgagaatgcccttcgttgtcaagcccccggagaagaaacatcgcctcccatctgcttacaatcgcttcatgagggaggagattcagcgcatcaaagctgcgaagccagatatccctcacagggaggccttcagcatggctgccaagaattgggcgaagtgtgacccgcgctgctcgacgactgcctctactgccacttctaacagcgctcctgagcctgctagagtcgtcgtgcccactcctcatgtaactgagccacgctttgatctggaggatagggccaaggagcatgtcattgagagcttcgacatcttcaagcagattgagcgcaacatctagatgtctccatttcgagtaccatcagctctatatataacctatgcatgcatatgcatccccatcttgtactttttacccccatgttactgttgctattattcttgctcttgttggattgtacgcacccttta

SEQ ID NO: 128 - protein, 206 aa, Zea mays
MDTVSQSEHLCYVRCTYCNTVLAVGVPCKRLMDTVTVKCGHCNNLSYLSPRPPMVQPLSPTDHPLGPFQCQGPCSECRRNQPLPLASPTSTDLTPRMPFVVKPPEKKHRLPSAYNRFMREEIQRIKAAKPDIPHREAFSMAAKNWAKCDPRCSTTASTATSNSAPEPARVVVPTPHVTEPRFDLEDRAKEHVIESFDIFKQIERNI

SEQ ID NO: 129 - DNA, 1001 bp, Zea mays
gcacgagcacacagctagcagacagccagacacgcgctgctttctgatctctccccggatcggaggctcctcccaacataccaccctgccagccgcgccgccacgtccacgccggccggccaccaagcaagcatggatatggtttcgcagtccgagcacctgtgctacgtccgctgcacctactgcaacaccgtgctcgcggttggggttccatgcaagaggctgatggacacggtgactgtcaagtgcggccactgcaacaacctctcctacctcagtccacggccccccatggtgcagccgctctcgccgactgatcaccctttggggccattccagtgtcagggaccctgcaacgactgcaggaggaaccaaccgctgccgctggcttcgccgtcatcaactgagctaagcccgagaatgcccttcgtagtcaagcccccggagaagaaacaccgcctcccatctgcttataatcgcttcatgagggaggagattcagcgcatcaaagctgcgaagccagatatccctcacagggaggccttcagcatggctgccaagaattgggcaaagtgtgacccgcgctgctcgacggctgcctctaccgaaacttctaacagcgctcctgctgagcctagagttgtgcccactccccagttaactgagccacgctttgacctggaggatagggccaaggggcaagtcattgagagcttcgacatcttcaagcatattgagcgcagcatctagaggtcgttcgatgccgctgttgtagcccagtatcgatcgagtaccatcagctatatgtataacctatcccgtatcgccgtcgtcgcctcgcaatcatgcatccccatcctgtacttttacccccgtacgtgttactgttgctgttattctcgttatggttggattgtacgcaccatttaattatgaacagctgctacctatatatataatatttgccttcttttttgttcctaaaaaaaaaaaaaaaaaaa

SEQ ID NO: 130 - protein, 205 aa, Zea mays
MDMVSQSEHLCYVRCTYCNTVLAVGVPCKRLMDTVTVKCGHCNNLSYLSPRPPMVQPLSPTDHPLGPFQCQGPCNDCRRNQPLPLASPSSTELSPRMPFVVKPPEKKHRLPSAYNRFMREEIQRIKAAKPDIPHREAFSMAAKNWAKCDPRCSTAASTETSNSAPAEPRVVPTPQLTEPRFDLEDRAKGQVIESFDIFKHIERSI

SEQ ID NO: 131 - DNA, 446 bp, Zea mays
  unsure (396)
  unsure (413)
  unsure (428)
  unsure (445)
aaacaatcagccacaagtgccaccaatacgaccctcagagaagagacagcgtgttccatcagcatacaacagattcatcaaggaagaaatacaaaggataaagacgagcaacccagagattagccacagggaagcattcagtgctgcagcaaagaattgggctcatctccctcggctccatttcggcctcagcgtcgctgacggcggcggcggcagcaactagggaagacgatgattacggatcgagctcttcgccttacacatatatatatgcagtgtgctatgtctgcttggattttgtaagccttattaagttttttgacacctgtgtttcagacctgtgcgtacttgcatgcatgatcctgcattgcgtgcagtaattacatgttggatctnatatgtatatgcatcangggtcacattctaantaatggaaatttgtcang

SEQ ID NO: 132 - protein, 73 aa, Zea mays
NNQPQVPPIRPSEKRQRVPSAYNRFIKEEIQRIKTSNPEISHREAFSAAAKNWAHLPRLHFGLSVADGGGGSN

SEQ ID NO: 133 - DNA, 894 bp, Zea mays
cctttcctcctcccccctgaccccggccattcagacgacgacgaagacagcgccgagaagatctcgccttcacaacaacgacgaacagcgggtacgtacttggagatccaagaagctaagaaatgtcagcccagtttgcatccgagcatgcttgctatgtcaactgcaactattgcaacactatcctggtggtgaatgtgccaagcagttgttcctacaacgtggtgactgttaaatgtgggcattgtacaatggtgctgtccatggatctcagtcccttccatcagcaggcacgcactgtcccagacaaccaggttgtccagaacagagggtttcagtataacaattttgggagctacgagcaagcctcgtcaagaaatctacgaacgcctcccatgtatccagtgtcaaacaatcagccacaagtgccaccaatacgaccctcagagaagagacagcgtgttccatcagcatacaacagattcatcaaggaagaaatacaaaggataaagacgagcaacccagagattagccacagggaagcattcagtgctgcagcaaagaattgggctcatctccctcggctccatttcggcctcagcgtcgctgacggcggcggcggcagcaactagggaagacgatgattacggatcgagctcttcgccttacacatatatatatgcagtgtgctatgtcgtgcttggattttgtaagccttattaagttttttgacaacctgtgttttcagacctgttgcgtacttgcatgcatgaatcctgcattgcgtgcagtaattaacatgtttgatgctatatatgatatatgcatgcatggtgtacaacattactaaataaatggaaaatatttgttcaagaaaaaaaaaaaaaaaaaaaa

SEQ ID NO: 134 - protein, 169 aa, Zea mays
MSAQFASEHACYVNCNYCNTILVVNVPSSCSYNVVTVKCGHCTMVLSMDLSPFHQQARTVPDNQVVQNRGFQYNNFGSYEQASSRNLRTPPMYPVSNNQPQVPPIRPSEKRQRVPSAYNRFIKEEIQRIKTSNPEISHREAFSAAAKNWAHLPRLHFGLSVADGGGGSN

SEQ ID NO: 135 - DNA, 596 bp, Zea mays
  unsure (517)
  unsure (524)
  unsure (534)
  unsure (536)
  unsure (542)
  unsure (546)
  unsure (548)
  unsure (558)
  unsure (561)
  unsure (563)
  unsure (576)
aggttgttgatgtaggctgtacgcacctgctggtttgctactcgatcctatatatcgtccaatcctatctgacctctcgacatctggtccttgattactcgtcctttttgcttggtgcctgtgtatatcgtcgccccggccgcttgagctagcttcctctagtgctcgctctcgtcgtcgatcggttgtttgcatagcccacggcgagccgaagcaatgtcgtcggcgcccctgcagatcgcgccggtgccggagcatgtgtgctacgtgcactgcaacttctgcaacacaattctcgcggtcagtgtcccgagtcacagcatgctgaacatcgtcacagtccgttgtgggcactgcactaacctgctgtcggtgaacttgagaagactcatccaatcacttcctgtccaaaaccaccactactcccagcaacaagagaattcaaccgtccaaaatatgggttttaccggaaaataccctgaataccacttcggtaccgcatgcaaacgaccgtcancgaaagngatctgggtnanaagcgnactncncgggtcaaanacngngattttgtgagantacataaatctaagataaat

SEQ ID NO: 136 - protein, 90 aa, Zea mays
MSSAPLQIAPVPEHVCYVHCNFCNTILAVSVPSHSMLNIVTVRCGHCTNLLSVNLRRLIQSLPVQNHHYSQQQENSTVQNMGFTGKYPEY

SEQ ID NO: 137 - DNA, 1005 bp, Zea mays
gcacgagaggttgttgatgtaggctgtacgcacctgctggtttgctactcgatcctatatatcgtccaatcctatctgacctctcgacatctggtccttgattactcgtcctttttgcttggtgcctgtgtatatcgtcgccccggccgcttgagctagcttcctctagtgctcgctctcgtcgtcgatcggttgtttgcatagcccacggcgagccgaagcaatgtcgtcggcgcccctgcagatcgcgccggtgccggagcatgtgtgctacgtgcactgcaacttctgcaacacaattctcgcggtcagtgtcccgagtcacagcatgctgaacatcgtcacagtccgttgtgggcactgcactagcctgctgtcggtgaacttgagaggactcatccaatcacttcctgtccagaaccaccactactcccagcagcaggagaatttcaccgtccaaaatatgggttttactgaaaattaccctgagtacgcaccttcgtaccgcatgccaacgacgctgtcagcgaaaggtgatctggatcatatgctgcacgtgcgcgggtcaaatgactgtggattttttgtgatgagttacatgaagtcttatgatcacaatgcaggtgtcatatcttctttcaatcaaccagacaattcccgagacctacgtgctcatgcccttcatcaactcacattccatcgcatcaacaaggtgttgccacttccattagatatccagagatttatgtttgcgcgcaattagtgaaatatgtcagaactaagcaatggtgtgggcaatgtaccgtactgtggtattttggccattattgtcagttaacaattgtaggaagcttccttatatgtgctgtttcagaacaattgtcatgctactttgtcttaggggtgttacccaggttctttctgtgaactttagttggctggatacttatggttatgttgcgaatatgtgaacatcatatgttttcaaaaaaaaaaaaaaaaaaa

SEQ ID NO: 138 - protein, 179 aa, Zea mays
MSSAPLQIAPVPEHVCYVHCNFCNTILAVSVPSHSMLNIVTVRCGHCTSLLSVNLRGLIQSLPVQNHHYSQQQENFTVQNMGFTENYPEYAPSYRMPTTLSAKGDLDHMLHVRGSNDCGFFVMSYMKSYDHNAGVISSFNQPDNSRDLRAHALHQLTFHRINKVLPLPLDIQRFMFARN

SEQ ID NO: 139 - DNA, 1041 bp, Zea mays
  unsure (1028)
  unsure (1033)..(1034)
  unsure (1038)
gtggtggaccggagctagtagctgccagccacacatttcggtcgtcggaaccacatatcatgatgtcgtcctcgtcctcgtcctcgtcgtcggccgcctgctgcttcccgctggaccacctcgcgccgtcccccaccgagcagctctgctacgtgcactgcaactgctgcgacaccatcctcgccgtcggcgtgccttgcagcagcctgttcaagacggtgacggtgcgtttgtggcactgcgccaacctactctccgtcaacctcccgcggctcctgtcccgccgccgcgccggcgccgcccaacatctcaacttcgctcactccttgctgtcacccacatccccgcatggcctcttggacgagttggctctccagcaggcgccgagcttcctgatggagcaggcgagtgccaacctgagcagcaccatgacgggccgcagcagcaacagcagctgcgccagcaacctgccgccgccggcgccgatgcctgcagctcagcctgtgcagcaggaagccgaactgcccaagaccgccccgtcggtaaacaggcctccggagaagaggcagcgcgtgccgtcggcgtacaaccgcttcatcaaggacgaaatccaacgcatcaaggctggcaatcccgacatctcgcacagggaggccttcagcgcggcggccaagaactgggcgcactttccacacatccactttggactcatgccagatcaccaggggcccaagaagacaagcctgctacctcaggatcaccagagaagcgacggcggcgggctactaaaggaagggctgtacgctgcggcagccaacatgggggttgctccatactaatataataataatcactcctacttacgtgctcaagcttataatattagagtagcaaagctgctacgtactgttagggctctatggactactacgaagctatggacgtgtttggtaggctgcatatgggccggccaggctggtaagatacagcgtacgcttgtttggttgctaaaaaaaaaaaaaaagggngggcnntttnaag

SEQ ID NO: 140 - protein, 261 aa, Zea mays
MMSSSSSSSSSAACCFPLDHLAPSPTEQLCYVHCNCCDTILAVGVPCSSLFKTVTVRCGHCANLLSVNLRGLLLPPAAPAPPNHLNFAHSLLSPTSPHGLLDELALQQAPSFLMEQASANLSSTMTGRSSNSSCASNLPPPAPMPAAQPVQQEAELPKTAPSVNRPPEKRQRVPSAYNRFIKDEIQRIKAGNPDITHREAFSAAAKNWAHFPHIHFGLMPDQGLKKTFKTHQDGAEDMLLKDDLYAAAAAAAAANMGITPF

SEQ ID NO: 141 - DNA, 2113 bp, Zea mays
gcacgaggtggtggaccggagctagtagctgccagccacacatttcggtcgtcggaaccacatatcatgatgtcgtcctcgtcctcgtcctcgtcgtcggccgcctgctgcttcccgctggaccacctcgcgccgtcccccaccgagcagctctgctacgtgcactgcaactgctgcgacaccatcctcgccgtcggcgtgccttgcagcagcctgttcaagacggtgacggtgcgttgtggccactgcgccaacctactctccgtcaacctccgcggcctcctgctcccgcccgccgcgccggcgccgcccaaccatctcaacttcgctcactccttgctgtcacccacatccccgcatggcctcttggacgagttggctctccagcaggcgccgagcttcctgatggagcaggcgagtgccaacctgagcagcaccatgacgggccgcagcagcaacagcagctgcgccagcaacctgccgccgccggcgccgatgcctgcagctcagcctgtgcagcaggaagccgaactgcccaagaccgccccgtcggtaaacaggcctccggagaagcggcagagagtcccgtcggcatacaaccggttcatcaaggacgagatccagcgcatcaaggccggcaacccggacatcacccaccgggaggcgttcagcgcagccgcaaagaattgggcccatttcccacacatccacttcggcctcatgccggaccagggcctcaagaagaccttcaagactcatcaggatggcgctgaagacatgctactcaaagacgatctctacgccgcagcggctgcagctgcagcagccaacatgggcatcactccattctaataactctgtgtggggatagaaatggagaataatcaagttagagcgcgcatcaagtaggccactgatgatccgtaggtacagacttgattgtctcctctatatatcccttttcatttcatgttctctctctttttcctattttttgttcctggaccccttcaactcgccagtagagagctcgttgtgcctctccaatcccatgtttgcgtatgtctgctcaacaacatgtttttaccatggagaacaagttgaacatctgttagatctatcaagagtgtcatatataaaaaaaaaaaaaaaaaactcgagcacaagtttcgtgggtagaggaggcactagatactgtgccagatcggggtctggtagtggcagttgggtgattacgacggagtgggatgggcctcctcgacaagctgtgggacgacaccgtcgcgggcccgcgcccggacaccggcctcggccgcctccgcaagcagcccgcgcgccccgccgccgttaagatcagtgatccggccggggacgctgcagcgctcgtgccgccctcgccggcttcgggtagcgaggagacgccggtgaaggtgacgcgcagcatcatgatcaagcgtcccgcggggtacccgtcttcgccgaggagcgcggcaagcacgccgccggcctctccactagggactaccccgcccatctcgccgtttgccggcgctggtggtcgcttcagaaggaaatcatcatccgacgcatatgagagggcaacccctccagggacgaccagccaccctcctcccttcgaagtgtgaaccggctgcaccctcacacttgttttgctccttgacaagcatctcttcacctataataaggtagaggcagggaggagagaagacgacatcaagaggggaacggggatgagttgcgggtttacctctgctgtgatatattgtaggtgccactatgtgtattgttcccccctatctactacgtggcataggttgtattctagtatgttgaaagctcatggtgccgtgctgtatcaataaggtgttatgcgcatagagtggctcaggaccagggctgcgtttgcgctttgccactggctgtgttgtatgtttcttctgctgctatgccattagggtttagggatggtgtgtggatggcgtcgtgcttgtagtgttagctgggtttgaagcggactacatgtaggtttgttcaatgtctggtatctattagctgaaggtgtttgcctgtaaaaaaaaaaaaaaaaaaaaaa

SEQ ID NO: 142 - protein, 261 aa, Zea mays; identical to SEQ ID NO: 140

SEQ ID NO: 143 - DNA, 1206 bp, Zea mays
ccacgcgtccggcatttcccctctctccagcacattgctgcttccacagttccacacacataaggccaccacagcaaataaaggcactgctgcactctctctctctctctctctctctctctctctctacgcgaaaagaaaagaggaaagtgggatagctcaatctctccttccaccgtctctcagttctcactctagcgctctctctctccacatatatatcagtaggatggatgtgcaaacctagcttgttgctgcctttctagctgagaactgagctgtagctgttggtacggttttcctcctcgctcttcttctccttcttcttgctgctggttgccgggagctgagatcgatcgagagcactgctgttgttcgtgcggccggaggcggcggcgcgcggcagggggcggagacgacgaccgatcggtcagaaggaatgtcgtcggcccaaatcgcgccggcggaccatgtgtgctatgtgcactgcaacttctgcaacacagttctcgcggtgagtgtcccggggaacagcatgctcagcatggtgacagttcggtgtgggcactgcacaaatctactgtcagtgaatctgagagcactcatgcactcagtcccagaacaagatcagctccaggagaacatcagggtccatggcacgttgcgtgagcatcatcagtgcggcggcggccaccatctggagctgggctcttcgtcgtcctcaaggttccggctgccgatgatgatgtcgtacgcgccgcagaacgagcacttgctgcaggaacagacactgaacaacgctcgtccggctcctgagaagaggcagcgggttccgtcggcgtataacagattcatcaaggaagagattcgcaggatcaaggcgaacaaccccgacattagccacagggaagccttcagcacagcagccaagaactgggcacattatccgaacatccatttcggcttaaactccggccgagagggtggcaagaataagctcgtggacgaggctgtcgcggcggtggcggtggctccgaagaagatccaaggtttctactgatcgatgccggtcgatcgagggatcagcgctcgtcgtcatcaactggccggccgggtgtggaagaattaataataccacacaaattataaatgtactgtgatgagtaaattaaagagttatagtggggaatgaagggagagagtgtt

SEQ ID NO: 144 - protein, 206 aa, Zea mays
MSSAQIAPADHVCYVHCNFCNTVLAVSVPGNSMLSMVTVRCGHCTNLLSVNLRALMHSVPEQDQLQENIRVHGTLREHHQCGGGHHLELGSSSSSRFRLPMMMSYAPQNEHLLQEQTLNNARPAPEKRQRVPSAYNRFIKEEIRRIKANNPDISHREAFSTAAKNWAHYPNIHFGLNSGREGGKNKLVDEAVAAVAVAPKKIQGFY

SEQ ID NO: 145 - DNA, 1416 bp, Zea mays
ccacgcgtccggcatttcccctctctccagcacattgctgcttccacagttccacacacataaggccaccacagcaaataaaggcactgctgcactctctctctctctctctctctctctctctctctacgcgaaaagaaaagaggaaagtgggatagctcaatctctccttccaccgtctctcagttctcactctagcgctctctctctccacatatatatcagtaggatggatgtgcaaacctagcttgttgctgcctttctagctgagaactgagctgtagctgttggtacggttttcctcctcgctcttcttctccttcttcttgctgctggttgccgggagctgagatcgatcgagagcactgctgttgttcgtgcggccggaggcggcggcgcgcggcagggggcggagacgacgaccgatcggtcagaaggaatgtcgtcggcccaaatcgcgccggcggaccatgtgtgctatgtgcactgcaacttctgcaacacagttctcgcggtgagtgtcccggggaacagcatgctcagcatggtgacagttcggtgtgggcactgcacaaatctactgtcagtgaatctgagagcactcatgcactcagtcccagaacaagatcagctccaggagaacatcagggtccatggcacgttgcgtgagcatcatcagtgcggcggcggccaccatctggagctgggctcttcgtcgtcctcaaggttccggctgccgatgatgatgtcgtacgcgccgcagaacgagcacttgctgcaggaacagacactgaacaacgctcgtccggctcctgagaagaggcagcgggttccgtcggcgtataacagattcatcaaggaagagattcgcaggatcaaggcgaacaaccccgacattagccacagggaagccttcagcacagcagccaagaactgggcacattatccgaacatccatttcggcttaaactccggccgagagggtggcaagaataagctcgtggacgaggctgtcgcggcggtggcggtggctccgaagaagatccaaggtttctactgatcgatgccggtcgatcgagggatcagcgctcgtcgtcatcaactggccggccgggtgtggaagaattaataataccacacaaattataaatgtactgtgatgagtaaattaaagagttatagtggggaatgaagggagagagagatatatagcaatacgtatattaccttaccttattaatgagtgcaaaaaaaacacttgtgaaggtttctactgatgcatgagtgggaagtgaagcatcatacaatcacatgaattatattactactggcatggtgggcgccatgcatggtttaaattaaccgagaagacgacttaataaatcattatttgacctaaaaaaaaaaaaaaaaaag

SEQ ID NO: 146 - protein, 206 aa, Zea mays; identical to SEQ ID NO: 144

SEQ ID NO: 147 - DNA, 1038 bp, Zea mays
  unsure (936)
  unsure (960)
  unsure (962)
  unsure (981)
  unsure (995)
  unsure (1003)..(1004)
  unsure (1007)
  unsure (1015)
  unsure (1027)
  unsure (1033)
  unsure (1037)
gtgcaaattaaactgttctgtacctgttggccttcctcctcgctcctcttggttctcgctggttgccgggagctggggtcgagagtacttctgttgttcgcacggcgaggcggcggcggagaccggtcagaaggaatgtcttcgtcccaaatcgcgccggcagatcatgtgtgctatgtgcactgcagcttctgcaacacagttctcgcggtgagtgtcccggggaatagcatgctcaacatcgtgacagttcggtgtggacactgcgcaaatctactgtcagtgaacctgagagcactgacgcactcactcccagaacaagatcatcagctccaggagaacatcaaggtccatggcatcaacggcactttgcatgatgatcatcagtgcggccatttggatcagctcggttcttcttcgtcgtcaaggttccggcggcttccagtgatgtgttcgccacagaacgggcagcacctgctgcaggagaaaacacttaacaacaatgctcgtcctccagagaagaggcagcgggttccgtcggcgtataacagattcatcaaggaagagatacgcaggatcaaagcgaacaaccccgacattaaccacagggaagccttcagcacggcagccaagaattgggcacattatccaaacatccatttcggtttagacgactccgggcgagagggcaagaagaagctcgtggatcatgaggcggcggcgtctgtcgtcgcagtcgcagcagcaccgactgctgctaaaaagatccagggtttctactgatggtagcagatagatgtgtagattgattgatacatcatcgaccgggtggaagaattgataccacaaaaactgctttatatatatgtactgtgagtaaacagttaagattaaacttgtgaagatgtaccgtacatatgaagagctagctagtantgagtcataaaagtgggaaagtgnancatatatagtccgttaaanacaatcacatgaantgctattnngcnccatatanatgcaccttaantaatantggnt

SEQ ID NO: 148 - protein, 215 aa, Zea mays
MSSSQIAPADHVCYVHCSFCNTVLAVSVPGNSMLNIVTVRCGHCANLLSVNLRALTHSLPEQDHQLQENIKVHGINGTLHDDHQCGHLDQLGSSSSSRFRRLPVMCSPQNGQHLLQEKTLNNNARPPEKRQRVPSAYNRFIKEEIRRIKANNPDINHREAFSTAAKNWAHYPNIHFGLDDSGREGKKKLVDHEAAASVVAVAAAPTAAKKIQGFY

SEQ ID NO: 149 - DNA, 563 bp, Oryza sativa
  unsure (96)
  unsure (102)
  unsure (405)
  unsure (408)
  unsure (441)
  unsure (457)
  unsure (545)
  unsure (551)
  unsure (555)
  unsure (559)
atggcgagcgcggcaagctgcaggaacaacaactccccggcggcggcggcggctccgccgccgccaacgtcgcaggggaaagcggcggcgaaaganccgtcnccccggacgaacaccgccgtcatcaacagacctccggagaagaggcagcgtgtgccatcggcgtacaaccgcttcatcaaggacgaaatccaacgcatcaaggctggcaatcccgacatctcgcacagggaggccttcagcgcggctgccaagaactgggcacactttccgcacatccactttggactgatgccggatcaccaagggctcaagaagaccaacctgcttcctcaggatcatcagagaaaggatgggctactaaaggaagggctttatgcaacgggcagctgctgctgcggcggnggncaaaatgggtgtttgcaccgtactaaagcccanctaagaataattagtngagaaattaagttactaatccaacaaagtccaagctaactcaacaatttactagtggtgttcctcctaacaaagctatctaaggcttnctgatnaacncccntggg

SEQ ID NO: 150 - protein, 133 aa, Oryza sativa
  UNSURE (32)
MASAASCRNNNSPAAAAAPPPPTSQGKAAAKXPSPRTNTAVINRPPEKRQRVPSAYNRFIKDEIQRIKAGNPDISHREAFSAAAKNWAHFPHIHFGLMPDHQGLKKTNLLPQDHQRKDGLLKEGLYATGSCCC

SEQ ID NO: 151 - DNA, 1308 bp, Oryza sativa
gcaccaggatagctcaatttctccttccttcctctctccatctaatctacacatgcacaaatgttgcagctgatatatggcttagctagcatatgcaaagcaagccttcctgcagtctagtcacctctcaagctacatactcccagtactgcttcatctagctctctctagtagctagctctatcatcatcgatcatcctcctctcaccggccggccaacccaagaagagattattcctcttcatcttcttcttcctctctgttcatcactggcttcggcggcggcggccgcggcggcgatcgatcagctgtgagaagaagaagaagaagaagaagaagaaatgtctgcccagatcgctccggcagagcaagtgtgctatgtgcactgcaacttctgcaacacgattctcgcggtgagtgtcccaggaaacagcatgctgaacatcgtgaccgtccggtgtgggcactgcacgaatctgctgtcagtgaacttgagaggactgatgcactcagccccagcactacaagatcatcatcatcatcatctccaggagagtggtctgagcggatgcttccgtgatcaaagtggctatccggagtttggtttttctgcagcttcgtcgtcttccaagctcaggctgcctcctgctgctgctgccatggtttcctactcgcagcaaaaccagcagctcgagcaagctctccatgctcgccctccagagaagaggcaaagggtaccttcagcctataacagatttattaaggaagagatacgaaggatcaaagcaaacaaccccgacattagccacagggaagccttcagcacagcagccaagaattgggcacattatccaaacatccattttggcctaagccctggccatgagggtggcaagaagctcgtcgacgtcgaccccatcccaactgctccatcttccaagaagatccaaggtttctactcatagattgaggggatcaatctgccgataccgataccgcaaataggaggaagagcatcaagagcacaaaacatatatatactgtgagtaaagaagcaaaggaaaaaagaaaagaaatgctgccaccttacctttgttcatgaccaaaaaacttgtgaagacgtatgtcataagtacatagaagaaatcaactcatatagagtgaaaaaaaacatacaaaaaatcaagctactatagctcatcgatcgactgaaaggctgaataaaccattcgaccataatgttgttacatgtataagtatgtttgaagctagctagctggctagttctttaaaaaaaaaaaaaaaaaa

SEQ ID NO: 152 - protein, 207 aa, Oryza sativa
MSAQIAPAEQVCYVHCNFCNTILAVSVPGNSMLNIVTVRCGHCTNLLSVNLRGLMHSAPALQDHHHHHLQESGLSGCFRDQSGYPEFGFSAASSSSKLRLPPAAAAMVSYSQQNQQLEQALHARPPEKRQRVPSAYNRFIKEEIRRIKANNPDISHREAFSTAAKNWAHYPNIHFGLSPGHEGGKKLVDVDPIPTAPSSKKIQGFYS

SEQ ID NO: 153 - DNA, 927 bp, Glycine max
gcacgagcttaaccctactcctctctctttcacccttctcctcctagctaatccttgttccttcgaaatatgaaccacgaagacaaactcaccatggacctggttccaccatctgaacacctctgctacgttcgttgcaacttctgcaacactgtcctcgcggttggtatcccatgcaagaggctgttagacactgtgacagtgaagtgtggtcactgcagcaacctctcctttctgagcaccagacccccaagttctcaaaaccaaagcattgatcataccaccctaagtctgcaggggttttacagtaatgccaaaaaggggcaagcatcatcttcatcttcctcaccaacaacatccaacgagtcggtgtccccaaaagcagcatcatttgttgtgaaaccacctgagaaaaagcaccgtctcccttctgcttacaaccgtttcatgaaagaggagatacagcgcatcaaagctgcgaaccctgagatcccacatcgagaagctttcagtgctgcagcgaaaaattgggctaggttcattccaaattcaccaaccagttcagtttctgcaactaaagttaacgctgattgatagagttgtggcatgatggtttggagagaattggatcaagttgactaattaatataaactaggtgtcatgcacttagttatattaaactatgtgttgtttaatttctctatctatatcttttaatttccttcagtatcgagatgaactttatgcatgcctatatgtagatccgaaacctgtttaattaatgaaggcaggacctatatgtatttagtaccaaatagtagtatttgttaatctaaaagataaatagctagagtttaatagtaatgttatgaagtaaaaaaaaaaatagtaatgttacatttttaaccaaaaaaaaaaaaaaaaaa

SEQ ID NO: 154 - protein, 174 aa, Glycine max
MNHEDKLTMDLVPPSEHLCYVRCNFCNTVLAVGIPCKRLLDTVTVKCGHCSNLSFLSTRPPSSQNQSIDHTTLSLQGFYSNAKKGQASSSSSSPTTSNESVSPKAASFVVKPPEKKHRLPSAYNRFMKEEIQRIKAANPEIPHREAFSAAAKNWARFIPNSPTSSVSATKVNAD

SEQ ID NO: 155 - DNA, 877 bp, Glycine max
  unsure (353)
atataagagaacgaaaaaagggggctacccaaaatgtcatcctcttccaccacattatcactggaccacctccctccttccgaacagctatgttatgttcactgcaacatttgtgacaccgtcctcgctgtaagtgttccttgcacaagcttgttcaagaccgtcacagtccgatgcggccattgcactaacctcctcccagtgaacatgcgagggttgcttatgccatctcccactcaatttcatttgggtcactctttcttctccccatctcataaccttctggaggagataccaaatccctctccaaattttctgatgaaccaaacaaatttaagtgcatcaaatgagtnctctatgcctgctaggattgcagctgatgagcttccacgaccgatcatgaatagacctcctgagaagagacagagagtcccctcagcgtacaatcgctttatcaaggacgagatccaacgcatcaagtctgtcaatcccgatataactcacagggaagccttcagtgcagctgcaaagaattgggctcacttcccacacatccactttggtctcatgcctgatcagactgtgaagaagacaaatgtgtgccagcaggaaggagaggaggttctcatgaaagatgggttttatgcttcggctaatgttggtgtctcaccctactaattcaccaagtctattttctctttcaagaaattatgcaaagaggaaaaattttccaagttcaccaacctttgaagctcagcaacgatctgattccttaattaacttatatatgcatctatttatggctcaagggcggttatgttgatataactaaggactactactactactacactatgatgattaactcttgggggtg

SEQ ID NO: 156 - protein, 214 aa, Glycine max
  UNSURE (107)
MSSSSTTLSLDHLPPSEQLCYVHCNICDTVLAVSVPCTSLFKTVTVRCGHCTNLLPVNMRGLLMPSPTQFHLGHSFFSPSHNLLEEIPNPSPNFLMNQTNLSASNEXSMPARIAADELPRPIMNRPPEKRQRVPSAYNRFIKDEIQRIKSVNPDITHREAFSAAAKNWAHFPHIHFGLMPDQTVKKTNVCQQEGEEVLMKDGFYASANVGVSPY

SEQ ID NO: 157 - DNA, 975 bp, Glycine max
gcacgagatataagagaacgaaaaaagggggctacccaaaatgtcatcctcttccaccacattatcactggaccacctccctccttccgaacagctatgttatgttcactgcaacatttgtgacaccgtcctcgctgtaagtgttccttgcacaagcttgttcaagaccgtcacagtccgatgcggccattgcactaacctcctcccagtgaacatgcgagggttgcttatgccatctcccactcaatttcatttgggtcactctttcttctccccatctcataaccttctggaggagataccaaatccctctccaaattttctgatgaaccaaacaaatttaagtgcatcaaatgagttctctatgcctgctaggattgcagctgatgagcttccacgaccgatcatgaatagacctcctgagaagagacagagagtcccctcagcgtacaatcgctttatcaaggacgagatccaacgcatcaagtctgtcaatcccgatataactcacagggaagccttcagtgcagctgcaaagaattgggctcacttcccacacatccactttggtctcatgcctgatcagactgtgaagaagacaaatgtgtgccagcaggaaggagaggaggttctcatgaaagatgggttttatgcttcggctaatgttggtgtctcaccctactaattcaccagtctattttctctttcaagaaattatgcaaagaggaaaaattttccaagttcaccaacctttgaagctcagcaacgatctgattccttaattaacttatatatgcatctatttatggctcaagggcggttatgttgatataactaaggactactactactactacactatgatgattagctcttggggttgtgcatgcatgcatgtagttctcttcttatgattagactttaattattaactttcatgttcttcaaaaaaaaaaaaaaaaaaaaaaaaaaaaa

SEQ ID NO: 158 - protein, 214 aa, Glycine max
MSSSSTTLSLDHLPPSEQLCYVHCNICDTVLAVSVPCTSLFKTVTVRCGHCTNLLPVNMRGLLMPSPTQFHLGHSFFSPSHNLLEEIPNPSPNFLMNQTNLSASNEFSMPARIAADELPRPIMNRPPEKRQRVPSAYNRFIKDEIQRIKSVNPDITHREAFSAAAKNWAHFPHIHFGLMPDQTVKKTNVCQQEGEEVLMKDGFYASANVGVSPY

SEQ ID NO: 159 - DNA, 749 bp, Glycine max
  unsure (238)
  unsure (621)
  unsure (641)
  unsure (710)
  unsure (713)
  unsure (722)
  unsure (726)
ctttctaggtgtattcgatcctctaatacttaagtggcatatctcttcaccctgtctctcttttccctttctttctatgttttgtttgctctctcctctcccttaacagtaactcaacaatcaagaggatcagatccataggaagttttatctgtccatcaccaaaaccgcgactgatcagtcaatcccatcaatcaaatcaaatcaaatcatcagaaagaaaagaaaagaaaagaanagaaaaaaggaaatcaacaaaaagaggaacaacatgtcctcctcatccacttccttttcaccggaccaacaacacctctctccctccgaccagctctgctatgtccattgcaacttctgtgacactgtcctcgcggtgagtgttccttgcaccagcttgttcaagaatgtcactgtgagatgtggtcattgcaccaaccttctctcagtcaacatgcgtggactgcttctccaagtgccaatcaagcttcaccttgggcacactttcttcactcctcaaaatcttatggaggagattcgtaatgcaccttcaacaaacataatgatgaatcaagctgccggaaccctaatgatttgggtcatgagcaccatgagaggaggggnctgaaagaaaacccctaagnctccatcaagctaataagaacctccagagaagaagacaagggaggttccgtctggcttacaaaccggcntcnatcaagggntggnggattcaaacggtatcaaagggg

SEQ ID NO: 160 - protein, 114 aa, Glycine max
MSSSSTSFSPDQQHLSPSDQLCYVHCNFCDTVLAVSVPCTSLFKNVTVRCGHCTNLLSVNMRGLLLQVPIKLHLGHTFFTPQNLMEEIRNAPSTNIMMNQAAGTLMIWVMSTMR

SEQ ID NO: 161 - DNA, 1045 bp, Glycine max
ttcggcacgaggtcttctgtaaaatcctcgatctagcttgtttcactttgtttcagtcaaggaattctcctctctgatctgccctataaatctactaagcaaacacaaaggacagtcacaatttttttttttgtttaaaaaaatgtcaatggacatgatggcaaccgaacgtgtttgttatgttcactgcaacttctgcaacaccactctagcggttagtgttccatgcagcagtttgctcaccatagttacggttagatgtggacattgtgccaatttgctgacagttaacatgggagcatcacttcaaacttttccttctcaagacactactcagcgattttctaccgttggtaagttacagagacagcatctcagtgttcaagaagcatgcagcaaggaactaggatcatcatcaaagtgcaaaacatttgagaccgtagaccatgatcagcaacctaggattcctcctattcgtcctcctgagaagagacaacgtgttccttctgcttataaccggttcattaaggaggaaatacaaagaattaaggctagtaatccagatatcagccacagggaagcatttagcacagcagccaaaaactgggcacatttccctcacattcactttgggttaaagctggatggcaataagcaagcaaagttggaccagggggatggtactcaaaagtctaacggattttactgattacatatatataaacggaagtttatcattatcaactggttttttctgtgcttgacctaaatcagtgaaaaatgaggttgatcaaatttcccaatcatacaactggatgggaagactcctgaaaattgacctcagcatctcacccatctttaatatatattattattatatgtatgtgttgcctttttctagttgttatgaaatgattgctattcttgtgattgcattaaattactatgttgaacttagtcacttaagtaagtaaacattattgtaagtttccttctctttataatgtgtcttgctatttagtatttaaaaaaaaaaaaaaaaaaa

SEQ ID NO: 162 - protein, 188 aa, Glycine max
MSMDMMATERVCYVHCNFCNTTLAVSVPCSSLLTIVTVRCGHCANLLTVNMGASLQTFPSQDTTQRFSTVGKLQRQHLSVQEACSKELGSSSKCKTFETVDHDQQPRIPPIRPPEKRQRVPSAYNRFIKEEIQRIKASNPDISHREAFSTAAKNWAHFPHIHFGLKLDGNKQAKLDQGDGTQKSNGFY

SEQ ID NO: 163 - DNA, 825 bp, Glycine max
  unsure (566)
  unsure (636)
  unsure (741)
  unsure (753)
  unsure (807)
agaagaaaagaaagaaaataatgtcaatggaaatgatggcaaccgaacgtgtttgttatgttcactgcaacttctgcaacaccattttggcggttagtgttccatacagcagtttgctaaccatagtgacggttagatgtggacattgtgccaatttgctatcagttaacatgggagcgtcacttcaagcatttccccctcaagaccctcagaaacagcttctaagctttgaagaaccaagcagctgcaaggaactgggatcatcatcttcaaaatgtaacaaaatagcgccatttcacgaggcagtagagcatgaacaacctaggattcctcccattcgtcctacagagaagagacatcgtgttccttctgcttataatcgcttcattaaggaggaaattcaaaggattaaggctagtaatccagatatcagccacagggaggctttcagctcagcagccaaaaactgggcacatttccctcacattcactttgggttaaagaacttaaagctggatggcaacaagcaagaaaagttggaccagggggaaggagctgaaaagtcnaatggattctactgatgatataaatggaagcctgtgagtatgagcttgtttttgttatgcttgacctaantcaagtgaaaaatatgaggttgatcaaatttcttcccaactatatccgtacaactggatgggagactcctgcaagttaaactcagcctctcacaccaatgtttantaggacctacanaatataatgtattgccccttttctatatatccgttgttattgaaaatggaatgncattccctggttgcttgg

SEQ ID NO: 164 - protein, 186 aa, Glycine max
MSMEMMATERVCYVHCNFCNTILAVSVPYSSLLTIVTVRCGHCANLLSVNMGASLQAFPPQDPQKQLLSFEEPSSCKELGSSSSKCNKIAPFHEAVEHEQPRIPPIRPTEKRHRVPSAYNRFIKEEIQRIKASNPDISHREAFSSAAKNWAHFPHIHFGLKNLKLDGNKQEKLDQGEGAEKSNGFY

SEQ ID NO: 165 - DNA, 937 bp, Glycine max
agaagaaaagaaagaaaataatgtcaatggaaatgatggcaaccgaacgtgtttgttatgttcactgcaacttctgcaacaccattttggcggttagtgttccatacagcagtttgctaaccatagtgacggttagatgtggacattgtgccaatttgctatcagttaacatgggagcgtcacttcaagcatttccccctcaagaccctcagaaacagcttctaagctttgaagaaccaagcagctgcaaggaactgggatcatcatcttcaaaatgtaacaaaatagcgccatttcacgaggcagtagagcatgaacaacctaggattcctcccattcgtcctacagagaagagacatcgtgttccttctgcttataatcgcttcattaaggaggaaattcaaaggattaaggctagtaatccagatatcagccacagggaggctttcagctcagcagccaaaaactgggcacatttccctcacattcactttgggttaaagaacttaaagctggatggcaacaagcaagaaaagttggaccagggggaaggagctgaaaagtctaatggattctactgatgatataaatggaagcctgtgagtatgagcttgtttttgttatgcttgacctaaatcagtgaaaaatatgaggttgatcaaatttcttcccaatatatcgtacaactggatgggagactcctgcaagttaacctcagcctctcacaccaatgtttaatagtactacatatatatgtattgcccttttctatatatcgttgttatgaaatgattgctattcttgtgattgcatttattgtgttgaatttgagcacttaagtaaacaacacgttcctctatatatcataataatgtccctttataatatgatcataatctataatattattggagtatgcaaaaaaaaaaaaaaaaaa

SEQ ID NO: 166 - protein, 186 aa, Glycine max; identical to SEQ ID NO: 164

SEQ ID NO: 167 - DNA, 859 bp, Triticum aestivum
  unsure (855)
ctacacacacactcgtccccctcctccaccttcttcttcttcttcttcttcttcttcttctacctcccaccctcctaccctccacatcctcgtcttctgttggctcttcgcgcgcgcccaagctcactcttgacctctccgtcccaccgacgccggccacccaccgccggaacgacccgtcgtccgttggctagcgagcatgcagagcatggatttggtgtcgccgtccgagcacctctgctacgtgcgctgcacgtactgcaacaccgtgctcgcggttggggttccatgcaagaggctgatggacacggtgactgtgaaatgcggccactgcaacaacctctcctttctcaagccacgggcgccgcccatggtgcaagccctctccccaaatgaccaacaccaccccatggggccgttccagggatgcactgactgcaggaggaaccagccactgccaccgctggcctcgccgacatcaagtgatgccagccccagagctccctttgttgtcaagcccccagagaagaaacaccgcctaccatcagcctacaatcgcttcatgagggaggaaatacagcgtatcaaagctgcaaagccagacatccctcacagagaagccttcagcatggctgctaagaactgggcgaagtgcgaccctcgctgctcatcgactgtctctgcttccaacagcgccccggagcccagaatagtagtgcccggtcctcagctgcaggagagggccacccgagcaagtcgttgagagcttcgacatcttcaagcagatggagcgcagcacctagggcatcataagcatgctgggattaattagtactgctaccacatgcgtcgatnactt

SEQ ID NO: 168 - protein, 187 aa, Triticum aestivum
MQSMDLVSPSEHLCYVRCTYCNTVLAVGVPCKRLMDTVTVKCGHCNNLSFLKPRAPPMVQALSPNDQHHPMGPFQGCTDCRRNQPLPPLASPTSSDASPRAPFVVKPPEKKHRLPSAYNRFMREEIQRIKAAKPDIPHREAFSMAAKNWAKCDPRCSSTVSASNSAPEPRIVVPGPQLQERATRASR

SEQ ID NO: 169 - DNA, 1115 bp, Triticum aestivum
gcacgagctacacacacactcgtccccctcctccaccttcttcttcttcttcttcttcttcttcttctacctcccaccctcctaccctccacatcctcgtcttctgttggctcttcgcgcgcgcccaagctcactcttgacctctccgtcccaccgacgccggccacccaccgccggaacgacccgtcgtccgttggctagcgagcatgcagagcatggatttggtgtcgccgtccgagcacctctgctacgtgcgctgcacgtactgcaacaccgtgctcgcggttggggttccatgcaagaggctgatggacacggtgactgtgaaatgcggccactgcaacaacctctcctttctcagcccacggccgccgcccatggtgcagcccctctccccaaatgaccaccaccaccccatggggccgttccagggatggactgactgcaggaggaaccagccgctgccaccgctggcctcgccgacatcaagtgatgccagccccagagctccctttgttgtgaagcccccagagaagaaacatcgcctaccatctgcctacaatcgcttcatgagggaggaaatacaacgtatcaaagctgcaaagccagacatccctcacagagaagccttcagcatggctgctaagaactgggcgaagtgcgaccctcgctgctcaacgactgtctctgcttccaacagcgccccagagcccagaatagtagtgcccggtcctcagctgcaggagagggccaccgagcaagtcgttgagagcttcgacatcttcaagcagatggagcgcagcgcctaaggcatcacaagcatgctgggattaattagtactgctaccgcatgcatcggttacttatcagctagctcatcatcatcatccgtcgctatgcatatatataatgcataagcgcacgcgtttaatttatgtttggttacttcgttgctgctgttgctgtgtcgttaagttgatggtgttgtctgttatatttgttgttggagcgtacgtacgcaccctttaattatgaacagctgctaccttataatattttttcatcgcgaaaaaaaaaaaaaaaaaaaaaaaaaaaaaaaaaaaaaaaaaaataaa

SEQ ID NO: 170 - protein, 200 aa, Triticum aestivum
MQSMDLVSPSEHLCYVRCTYCNTVLAVGVPCKRLMDTVTVKCGHCNNLSFLSPRPPPMVQPLSPNDHHHPMGPFQGWTDCRRNQPLPPLASPTSSDASPRAPFVVKPPEKKHRLPSAYNRFMREEIQRIKAAKPDIPHREAFSMAAKNWAKCDPRCSTTVSASNSAPEPRIVVPGPQLQERATEQVVESFDIFKQMERSA

SEQ ID NO: 171 - DNA, 549 bp, Triticum aestivum
  unsure (90)
  unsure (404)
  unsure (416)
  unsure (421)
  unsure (441)
  unsure (448)
  unsure (456)
  unsure (462)
  unsure (476)
  unsure (494)
  unsure (503)
  unsure (506)
  unsure (536)
  unsure (538)
  unsure (541)
ggaaagctagacagctcaatttctccttcctctctgcccatacatatctctctctctctccatcgatctaacctacacacccagagaaanagagagaagcagcagtagcacatgtaacctagctagcctgcagttctccgcgccaacgcttcttcttcttggctgccgcctggtgaacctcgccgtagtctgaacggctaggggggcagcgaggcggcggctccaggggataatcaggaggaatgtcgtcgtcgggccagatcacgccggcagaagaagtctgctacgtccactgcaacttctgcaacaccgtactcgcggtgagtgtccctgggaacagcatgctcaacattgtgacagtccggtgtgggcactgcacaaacctactttcccgtgagcctganagggcagatgcnctcancaatccctcccgcaacaaanggtccanggaaaatnacctgngcaagcccaatggnaatgaacaacttcattcncgattaaancancgtctacaataaccccggagtttgggtcgncntcntcctcatg

SEQ ID NO: 172 - protein, 50 aa, Triticum aestivum
MSSSGQITPAEEVCYVHCNFCNTVLAVSVPGNSMLNIVTVRCGHCTNLLS

SEQ ID NO: 173 - DNA, 1078 bp, Triticum aestivum
gcacgagggaaagctagacagctcaatttctccttcctctctgcccatacatatctctctctctctccatcgatctaacctacacacccagagaaagagagagaagcagcagtagctcatgtaacctagctagcctgcagttctccacggcaacgcttcttcttcttggctgccgcctgttgaacctcgccgtggtctgaacggctaggggggcagtgaggcggcggcgccaggggataatcagaaggaagaatgtcgtcgtcgggccagatcacaccggcagaagaagtctgctacgtgcactgcaacttctgcaacaccgtactcgcggtgagtgtccctgggaacagcatgctcaacatcgtgacagtccggtgcgggcactgcacaaacctactttcggtgagcctgagagggcagatgcactcaccggtccctcctgcggcacaggtccaggagagcagcctgagcaagcccaatggcagcaacggcttcattcgtgaccacggcagcgcctacaatagcccggagtttgcttcgtcttcttcttcatcgtcgtccaaattccggatgccgacgatgatgttctcatcgcaaaacgatctgctgcaggagcaaacgctgcacgcacgtcctcctgagaagaggcagcgtgttccttcggcgtacaacagattcatcaaggaagagatacgaaggatcaaagcaaacaaccccgacattagccacagggaagctttcagcactgccgcaaagaactgggcacattatccaaacatccatttcggtctaaaccccgagcgcgacggtggcaagaggctcgccgtcgacgatgccgcgccggctgccaagaagatccaaggtttctgttcatagacacgacggctgggagtccaaacaagaacaactgtatctatatatagtattagtaatatcgcatatgtgtatacgtaccgcatgtgagtaagtaaagatgcaaaggaaaagagaagtcgctacgtaccttaccttatacaattgtacgtacatatatatatatatatatggcgatcgagtgaataaaaaaaaaaaaaaaaaa

SEQ ID NO: 174 - protein, 207 aa, Triticum aestivum
MSSSGQITPAEEVCYVHCNFCNTVLAVSVPGNSMLNIVTVRCGHCTNLLSVSLRGQMHSPVPPAAQVQESSLSKPNGSNGFIRDHGSAYNSPEFASSSSSSSSKFRMPTMMFSSQNDLLQEQTLHARPPEKRQRVPSAYNRFIKEEIRRIKANNPDISHREAFSTAAKNWAHYPNIHFGLNPERDGGKRLAVDDAAPAAKKIQGFCS

SEQ ID NO: 175 - DNA, 866 bp, Triticum aestivum
ttcaccttcttcttctctccatcttccttctttcgtcttcctcatcctctcccccctccccttcttttattcgcggaggtatcttgctacgtcggcaagggaaataatgtcggcacagatcgcgccgccggagcatgtctgctacgtgcactgcaacttctgcaacacaattctcgcggtcagtgttccaagtaatagcatgctgaacatcgtcaccgtccgttgcgggcactgcactagcctgctgtcggtaaacttgaggggattaatccagtcgccacctgtgcaagatcattcccaggagaatttcaaggcccacaatatcagctttcgtggaaattacccggactatggcacatcttctaaataccggatgccaatgatgttctcaacaaaaagtgaccaagagcatatgctccacatgagaccagctccagagaagaggcagcgggttccttcagcgtataaccgatttattaaggaggagatacgaaggataaaaacaaacaatcctgacataagccacagagaagccttcagcaccgcagcaaagaattgggcgcatttcccaaacattcatttcgggctaggctccaatgagagcagcaagaagctggacgaggccatcgcggcacctaccccccagaaagttcaaggtctctactgagacatatattcctatatgcatgatactttcatattgtaagtaacttagggaaaacctaagttaatttctgaatcagtttgtgagtgagtacatagatcatgagcgagtgatatgcatgaagtgagaaagaggcatatgggagtgtatgcagtagtagctatcgtacatgcatatagaagacgtctgaataaatccctgg

SEQ ID NO: 176 - protein, 186 aa, Triticum aestivum
MSAQIAPPEHVCYVHCNFCNTILAVSVPSNSMLNIVTVRCGHCTSLLSVNLRGLIQSPPVQDHSQENFKAHNISFRGNYPDYGTSSKYRMPMMFSTKSDQEHMLHMRPAPEKRQRVPSAYNRFIKEEIRRIKTNNPDISHREAFSTAAKNWAHFPNIHFGLGSNESSKKLDEAIAAPTPQKVQGLY

SEQ ID NO: 177 - DNA, 805 bp, Zea mays
gcacgagggtagccggtaggcgagagagtcaggattcaggacgcggcgaggccaccatgagcactctcaagttctgccgggaatggtaaaagcgacgaaattcaacaacatgctgtacccgcgggaggacaaggagacgcgcaccctcctgtacgcgtgccaaacgtgcgagcatgaggagattgccactgatacttgtgtgtacaaaagggttatccgcaagcctggtggtgagcccaaggatgtcctgaaggatgcagcaactgatcctagcctgcctcgcaccagaagcgtcagatgttacaactgcaaccatccagaagctgccttttttcaggccccgactaagggagaacaagccatgacgctgtacttcatctgctgcaacccaagctgcgggcacaggtggagggactgagaaggatctggcttggtcttcgctgcaaacctgccgtattgttagcctatcacataaatattgtaggtacaagttgtgccgtcaactgacgtttgatgcaagcttataagctactataacctcgtaacaaaacgatggtttggctggagacgaaatctgttgttcctgatgataagccaaaaactttacggccgagctcaggtaagaaacagaagcggctatgaactactgtggtgtttggtttgaggaatgagctagtctatcatcttctcactcctcactatttttgtttggtttgtggaatagaatgagttgatccctcccccaaaaaaaaaaaaaaaaaaaaaaaaaaaaaaaaaaaaaaaaaaaaaaaaaaaaaaaaaaaaa

SEQ ID NO: 178 - protein, 111 aa, Zea mays
MVKATKFNNMLYPREDKETRTLLYACQTCEHEEIATDTCVYKRVIRKPGGEPKDVLKDAATDPSLPRTRSVRCYNCNHPEAAFFQAPTKGEQAMTLYFICCNPSCGHRWRD

SEQ ID NO: 179 - DNA, 619 bp, Zea mays
caaatctccactcccaatcaaccacttgctgcaaagaggaatacgattcagcttagctcagctccaccaccaccaagaacaagatctcgacgaagcagccagacgacaggcaggtagcaccggggtcaacgcggcagacaaacaggctctcccgctcgtcagctagcagccatgagtaccatgaagttttgccgtgaatgcaacaacatcctgtaccccaaggaggaccgggagcagaaggtgctcctctacgcctgccggaactgcgaccaccaggaggtcgcggacaacaactgcgtgtaccggaacgtggtgcaccacagcgccggggagttcacccaggtgctccaggacgtggccggcgaccccacgctgccccgcaccaagtccgtgcgttgctcctcctgcggccacggcgaagccgtcttcttccaggccactgcgagaggggaggaagggatgacgctcttcttcgtctgctgcaacccgagctgcggcaaccgttggagaaaataatggacggttcctctggcgcaacaaccaagacgacatgattttttttgcaagattttcatccgacaagacctgctgctccccccatatgagcatgtcaactgat

SEQ ID NO: 180 - protein, 114 aa, Zea mays
MSTMKFCRECNNILYPKEDREQKVLLYACRNCDHQEVADNNCVYRNVVHHSAGEFTQVLQDVAGDPTLPRTKSVRCSSCGHGEAVFFQATARGEEGMTLFFVCCNPSCGNRWRK

SEQ ID NO: 181 - DNA, 649 bp, Oryza sativa
gcacgaggtgaattggagaggaggaggaagccatcgatggccatgagcgccctcaagttctgcggcgaatgcagcaacatgctctacccgcgggaggacaaggagacgcacaccctgctctacgcctgcaattcctgcgagcaccaggagcctgccactgacacttgtgtgtacaaaagggttctccgtaaacctgctggggaacccaaagatatcctaaaagatgcagcaactgatcccaccctgcctcgcaccagaagtattaaatgttacaactgtggccatccagaggctgctttttttcaggctccaactaagggggagaaaggcctgacactgtacttcatctgctgcaacccaagctgtggtcacaggtggagggattgacggcaaggttcatggtgctgaatcttgcccgttcttgtgttcatgctcatacccggtgttatctgaaggactggaacttctacaagtaatgtagtttgtgaattgtgtgactgatgtagctccgaggtcatttaactgctgtgattgtcttgtcaacttaatgtgtccggggttgttgggtgccctggaccctgttgtcactttggtccaattctgaaagggaaaagtacaccgaaggtccctcaaaaaaaaaaaaaaaaaa

SEQ ID NO: 182 - protein, 116 aa, Oryza sativa
MAMSALKFCGECSNMLYPREDKETHTLLYACNSCEHQEPATDTCVYKRVLRKPAGEPKDILKDAATDPTLPRTRSIKCYNCGHPEAAFFQAPTKGEKGLTLYFICCNPSCGHRWRD

SEQ ID NO: 183 - DNA, 482 bp, Oryza sativa
  unsure (95)
  unsure (162)
atcactgtaaaacatcccttcttcttcttcttcactagcttctcactcactcacctcctccatattcccctttcttgcaaaggagaaaggaacangaataggattcagctcaggtcagctccatcactgcagagaatataaagatctgaaagaggcaagcanacaaggtcaggtcaggtcaggtcagaggagaagctagcagccatgagtaccatgaaattttgccgcgaatgcaacaacatactgtatcccaaggaggatagggaccagaagattctgctctatgcctgcaggaactgtgaccaccaggaggttgcagacaacaactgcgtctaccggaatgtggtgcaccacagcgccggagagttcacccaagtgctccaggatgtcgccggcgatccgactctccctcgcaccaaggcggtccggtgcgcggtctgtggccacggcgaggccgtgttcttccaggccactgccaagag

SEQ ID NO: 184 - protein, 92 aa, Oryza sativa
MSTMKFCRECNNILYPKEDRDQKILLYACRNCDHQEVADNNCVYRNVVHHSAGEFTQVLQDVAGDPTLPRTKAVRCAVCGHGEAVFFQATAK

SEQ ID NO: 185 - DNA, 876 bp, Oryza sativa
gcacgagatcactgtaaaacatcccttcttcttcttcttcactagcttctcactcactcacctcctccatattcccctttcttgcaaaggagaaaggaacaagaataggattcagctcaggtcagctccatcactgcagagaatataaagatctgaaagaggcaagcagacaaggtcaggtcaggtcaggtcagaggagaagctagcagccatgagtaccatgaaattttgccgcgaatgcaacaacatactgtatcccaaggaggatagggaccagaagattctgctctatgcctgcaggaactgtgaccaccaggaggttgcagacaacaactgcgtctaccggaatgtggtgcaccacagcgccggagagttcacccaagtgctccaggatgtcgccggcgatccgactctccctcgcaccaaggcggtccggtgcgcggtctgtggccacggcgaggccgtgttcttccaggccactgccagaggggaggaagggatgaccctgttcttcgtctgctgcaacccgagctgcggtcacagatggagagaatgagatcaatttgtagtcaaccaagtgaagaaagtcattgatgcaaatgatcagagagacatatgattttgatttcatccaagagacattccatagaagcatagactgattgtatgtttaaatttttaaaaacacattcaggcatcggtattttgtgtaacttctgaaggaaaaggatcaagactactaggataaaacattctgtggtctattccttccttataaacaaaggatgggatgaggacagttttcttggtgattcaaaaaaaaaaaaaaaaaaaaaaaaaaaaaaaaaaaaaaaaaaaaaaaaaaaaaaaaaaaaa

SEQ ID NO: 186 - protein, 114 aa, Oryza sativa
MSTMKFCRECNNILYPKEDRDQKILLYACRNCDHQEVADNNCVYRNVVHHSAGEFTQVLQDVAGDPTLPRTKAVRCAVCGHGEAVFFQATARGEEGMTLFFVCCNPSCGHRWRE

SEQ ID NO: 187 - DNA, 494 bp, Glycine max
  unsure (392)
  unsure (409)
  unsure (449)
  unsure (464)
gagcatccagtaagtttcctactcccttctcatcgttggcaagatgagtgccatgaaattttgccgtgaatgcaataacattctgtaccctaaggaagacagagaccagaaagttcttctcttcgcttgccgcaactgcgaccatcaggaggttgctgataacttctgtgtgtataggaatgagatacatcactctgttggagagcgcactcaggtgttgcaagatgtcgctgcagatccaacgcttcctcgaaccaagtctgttcgctgcagtcaatgcaatcatggtgaagctgtctttttccaagcaactgccagaggggaagaaggaatgacactttttttcgtttgctgcaacccaaactgtggacacagatgggagagactgaaanttgtgcctcctcagatnaaaaggtcaataatgggggagatctaactaatttgtgggntatctgaaaaaaacntggctggatgccggggaaaagtaataactg

SEQ ID NO: 188 - protein, 114 aa, Glycine max
MSAMKFCRECNNILYPKEDRDQKVLLFACRNCDHQEVADNFCVYRNEIHHSVGERTQVLQDVAADPTLPRTKSVRCSQCNHGEAVFFQATARGEEGMTLFFVCCNPNCGHRWER

SEQ ID NO: 189 - DNA, 762 bp, Glycine max
gcacggagcatcgagtaggtttcctactcccttctcatcgttggcaagatgagtgccatgaaattttgccgtgaatgcaataacattctgtaccctaaggaagacagagaccagaaagttcttctcttcgcttgccgcaactgcgaccatcaggaggttgctgataacttctgtgtgtataggaatgagatacatcactctgttggagagcgcactcaggtgttgcaggatgtcgctgcagatccaacgcttcctcgaaccaagtctgttcgctgcagtcaatgcaatcatggtgaagctgtctttttccaggcaactgccagaggggaagaaggaatgacactttttttcgtttgctgcaacccaaactgtggacacagatggagagactgaaatttgtgcttcctcagatcaaaggttcaatattggggagatctaactatttgtggttatctgaaaaaacttggctgatgcggggacagtaatactgaagtatttgtgttacctgtttaactgcagttcctgatcaaataattaatacagttaatggacaaactgttgtttgccaatgctgataaattctgaggatgggcataaatttcatggtttgttaaaaggaaaaaggatgagtgacactgcttttatggatgggcctaactttcttggtggggagttaggaatcaaaatgacttttttttttgttatatgctatattatttgatgaaaaattcttattaaaagttcaaaaaaaaaaaaaaaaaa

SEQ ID NO: 190 - protein, 114 aa, Glycine max
MSAMKFCRECNNILYPKEDRDQKVLLFACRNCDHQEVADNFCVYRNEIHHSVGERTQVLQDVAADPTLPRTKSVRCSQCNHGEAVFFQATARGEEGMTLFFVCCNPNCGHRWRD

SEQ ID NO: 191 - DNA, 587 bp, Triticum aestivum
  unsure (506)
  unsure (518)
  unsure (529)
  unsure (535)
  unsure (545)
  unsure (564)
  unsure (580)
gagaagcgaagccaaggggacagcagcgggcgagagaggcagagagaggcgaggagaggacatcgccgtcgccatgagcgccctcaagttctgcagcaaatgcgacaacatgctgtatccgcaggaggacaaggagatgcacaccctcctctacgcctgctcgaattgccagcaccaggagattgctactgatacttgtgtgtacaaaagggttcttcggaaatctgctgatgaacctaaagacaccctaaaagacgcagctgctgatgcgtctctgccacgcaccagaagtgttaaatgctacaactgtggctatccagaagctgcttatttccaggccccgacgaagggagagttgggcctgacctgtacttcatctgctgcagcctactgtgggcacaagtgggagggactgactgactgactgacaaggggggagcctccccagaacggatgttcgtcttggactgaaacttgactggcctgtgttctcatgactgcgttgnctaacttgttancttgtggaacngtgtcnaagttagggnactcacatgtgacttacgnttcgacttgtccctcnttaaaaa

SEQ ID NO: 192 - protein, 116 aa, Triticum aestivum
MSALKFCSKCDNMLYPQEDKEMHTLLYACSNCQHQEIATDTCVYKRVLRKSADEPKDTLKDAAADASLPRTRSVKCYNCGYPEAAYFQAPTKGELGLTCTSSAAAYCGHKWEGLTD

SEQ ID NO: 193 - DNA, 589 bp, Triticum aestivum
  unsure (533)
  unsure (541)..(542)
gggattctaaggctccgctccacaccaagagtagcgaagatctctgatttgagagagggaagcatcgaatcagccgacaggaggaggtctcagtcaccaacccagcagcagccatgagtgccatgaagttttgccgtgaatgcaacaacatcttgtatcccaaggaggaccgggaccagaaggtgctcctcttcgcctgcaggaactgcgaccaccaggaggttgcagacaacaactgtgtctaccgcaacgtggtgcaccacagcgctggagagttcacccaggtgctccaggacgtcgccggcgacccaacacttccccgcaccaaggaagtccggtgcgccgtctgtggtcacggcgaagctgtcttcttccaggccaccgcgagaggtgaggaggggatgacgctcttcttcgtctgctgcaacccgagctgcggtcatcggtggagaaatgttgtcatcaccaacgatacgattacgatcacatctaagattgttttcttctccagaatattcccagtacataattgntgtagttnnattatgaggggatacattcataccatagaaacacgcttacggtaaat

SEQ ID NO: 194 - protein, 116 aa, Triticum aestivum
MSAMKFCRECNNILYPKEDRDQKVLLFACRNCDHQEVADNNCVYRNVVHHSAGEFTQVLQDVAGDPTLPRTKEVRCAVCGHGEAVFFQATARGEEGMTLFFVCCNPSCGHRWRNVV

SEQ ID NO: 195 - DNA, 761 bp, Triticum aestivum
gcacgaggggattctaaggctccgctccacaccaagagtagcgaagatctctgatttgagagagggaagcatcgaatcagccgacaggaggaggtctcagtcaccaacccagcagcagccatgagtgccatgaagttttgccgtgaatgcaacaacatcttgtatcccaaggaggaccgggaccagaaggtgctcctcttcgcctgcaggaactgcgaccaccaggaggttgcagacaacaactgtgtctaccgcaacgtggtgcaccacagcgctggagagttcacccaggtgctccaggacgtcgccggcgacccaacacttccccgcaccaaggaagtccggtgcgccgtctgtggtcacggcgaagctgtcttcttccaggccaccgcgagaggtgaggaggggatgacgctcttcttcgtctgctgcaacccgagctgcggtcatcggtggagagaatgatgtgtccatcacccaaccgatgacggatttcaccgatgcaacagtctgagagagttgttttttctttcttcccaagagatattttccccagtagcatgaattggctgtatgtttcagatgtattgaggcggcatatcattttcataactccatgaggaaaaaacaaccgcgtctaccggggtaaaaatatccctgtggtccattgcattaatcaaaggatgctacgaggacatttttctcaaaaaaaaaaaaaaaaaaaaaaaaaaaaaaaaaaaaaaaaaaaaaaaaaaaaaaaa

SEQ ID NO: 196 - protein, 114 aa, Triticum aestivum
MSAMKFCRECNNILYPKEDRDQKVLLFACRNCDHQEVADNNCVYRNVVHHSAGEFTQVLQDVAGDPTLPRTKEVRCAVCGHGEAVFFQATARGEEGMTLFFVCCNPSCGHRWRE

SEQ ID NO: 197 - DNA, 483 bp, Zea mays
  unsure (447)
  unsure (465)
gcggctccgccctcctctgtgtcttgcttccacctgaaaacccacacgctcgcgtcgcgcctcccagctcttccgcgaagaaacaccgaggcccatggcgccgagaacgtcagagagagcgatgacatcggcggccgcggggctcgcgcgtggcgccggcccgcactacagaggcgtcaggaagcggccgtggggccggtacgccgcggagatccgcgacccggccaagaagagccgcgtgtggctcggcacgttcgacacgcccgaggacgccgcgcgggcctacgacgccgccgcgcgcgagtaccgcggcgccaaggccaagaccaacttctccttcccttcgtgcctgccgctcgccgccgcggacgtcggcggcgcctgccggagcggcaacagcagcagcatcaccaccaccgtcggactccttcgggggcgacgtggcangcgactctgatctttagngtgaaactacgaacatgt

SEQ ID NO: 198 - protein, 83 aa, Zea mays
MAPRTSERAMTSAAAGLARGAGPHYRGVRKRPWGRYAAEIRDPAKKSRVWLGTFDTPEDAARAYDAAAREYRGAKAKTNFSFP

SEQ ID NO: 199 - DNA, 984 bp, Zea mays
gcacgagaaccgcctcgctgaaccggaagacccgcacacacacgccacttgtagaccatggcgccccgggtggcggacaagtcgcctctaccgccggccaccggcctggggctgggcgttggcggaggagtcggaggcgtgggcatgggcccgcactacagaggcgtgaggaagcgtccatggggacgttacgccgccgagatccgcgaccctgccaagaaaagccgcgtgtggctcggcacgtacgacacggccgaggaggccgccaaggcgtacgattccgccgcccgcgagttccgaggcgccaaggccaagacgaacttcccgttcccgtcccagtgctccgtcgcctccggtgctgccggtagcgccagtagcaacagcaccgtggattcgagcggtggcggtagcggctgtggcatccaggcgcctatgcaggccatgccgcttcctccggctctcgacctcgacctcttccatcgggcggccgccgtgaacgcagtctccaccggcatgcggtttccgttcaagggctatcctgtcgcctgcccgacgccacagcagtactttttctacgagcaggcggctgccgcggcatccggataccggatgctcaaggtcgctccaccggccgtgactgtggccgcggttgcgcagagcgactccgactcgtcgtctgtggttgatcactccccttcgcctcccgcggtgacggcaaacaaggtgggcttcgaactggatctgaactggcccccgccggcagagaactaggcaggccggagtttttggctgacgacttagtagcttccttttcccttttgccttcatcaggaatgttacttgtggttgttttggtcctgtatggctgtattcttgttctgtagactaagagatggggagtcttgtaaatattttttttccgtcgagacggaaatgaactgagatctgttcgtctgtctgatcaaaaaaaaaaaaaaaaaaaaa

SEQ ID NO: 200 - protein, 237 aa, Zea mays
MAPRVADKSPLPPATGLGLGVGGGVGGVGMGPHYRGVRKRPWGRYAAEIRDPAKKSRVWLGTYDTAEEAAKAYDSAAREFRGAKAKTNFPFPSQCSVASGAAGSASSNSTVDSSGGGSGCGIQAPMQAMPLPPALDLDLFHRAAAVNAVSTGMRFPFKGYPVACPTPQQYFFYEQAAAAASGYRMLKVAPPAVTVAAVAQSDSDSSSVVDHSPSPPAVTANKVGFELDLNWPPPAEN

SEQ ID NO: 201 - DNA, 1260 bp, Zea mays
gtcaaagcgctcgtccctgactggtgactgcgccgagttttattccttgttgccgctccaccacccgctctcgccattgccaccctttttaacccccccttcctctcctccaccaccgctataagtccctcctccgctctcctctcccacctcaaatcccagacgccacgccacccaacacatacaaacacacgcacgcgcgcgcgcgcgcctcccgctgttccgcaaaacaaaggaaacgaaggagaggaggccatggcgccgagaacgtcagagaaaaccatggcaccggcggcggccgctgccacggggctcgcgctcagcgttggcggcggcggcggggccggcggcccgcactacagaggcgtgaggaagcggccgtggggccggtacgcggcggagatccgcgacccggcgaagaagagccgggtgtggctcggcacctacgacacggccgaggacgccgcgcgggcctacgacgccgccgcgcgcgagtaccgcggcgccaaggccaagaccaacttcccttacccctcgtgcgtgcccctctccgcagccggttgccggagcagcaacagcagcaccgtcgagtccttcagcagcgacgcgcaggcgcccatgcaggccatgccgctcccgccgtcgctcgagctggacctgttccaccgcgcggcggccgcggccacgggcacgggcgctgccgccgtacgcttccctttcggcagcatccccgttacgcacccgtactacttcttcgggcaggccgcagccgcagccgcggaagcagggtgccgtgtgctcaagctggcgccggcggtcaccgtggcgcagagcgactccgactgttcgtcggtagtggatctgtcgccgtcgccaccggccgctgtgtcggcgaggaagcccgccgcgttcgatctcgacctgaactgctcaccgccgacggaggcggaagcctagtcgtcgaagcttttaatgactgtctgtcttcttagttctttcttctcctttttctcgaggaaaattcggtactactaagctgagagacgctctcctccgacagacgacgtcgacgacgggcatttttgtaaatagtttttgcgccgggacctttttagtttatgatgaaagctgtattgtcaccgaagacaggtcctgccggcgttgttatggaccggattactatattatattatgcactactagtattttgatagccatgagaaaaaaaaaaaaaaaaaaaaaaaaaaaaaaaaaaaaaaa

SEQ ID NO: 202 - protein, 233 aa, Zea mays
MAPRTSEKTMAPAAAAATGLALSVGGGGGAGGPHYRGVRKRPWGRYAAEIRDPAKKSRVWLGTYDTAEDAARAYDAAAREYRGAKAKTNFPYPSCVPLSAAGCRSSNSSTVESFSSDAQAPMQAMPLPPSLELDLFHRAAAAATGTGAAAVRFPFGSIPVTHPYYFFGQAAAAAAEAGCRVLKLAPAVTVAQSDSDCSSVVDLSPSPPAAVSARKPAAFDLDLNCSPPTEAEA

SEQ ID NO: 203 - DNA, 1002 bp, Oryza sativa
cttacaccattcccaatccccaccgcctcgattccgattcccatctcctcgattcccgagcttggcgcgggcatgcgtcgcggcggcgcggcggaggaggacgcggaggcggcgaggttccgcggggtgcggaagcggccgtgggggaggtacgcggcggagatccgcgacccggcgaagaaggcgcgggtgtggctggggacctacgactccgccgaggacgccgcgcgcgcctacgacgcggcggcgcgggcgctgcgcggggccaaggccaagaccaacttccccctctccctcccccacgcccaaccccagctccaccaccaccaccaccaccacctcacctaccccgccgccgctgttgtcgccgctaggccggccactagcagcctcagctccaccgtcgagtcgttcggcacccggccgcggccggtgctcccgccgcggccgcccccgccgccgccgatccccgacggtgactgccgcagcgactgcgggtcgtcggcgtcggtggtggacgacgactgcgcggacgccgccgcctcgccctcgtgccggctcccgttccagttcgacctcaacctgcctcctggtggaggcggcggcggcggcggcggctttggctgtgcctacgacgacgaggagctgaggctgacggcgctgcggctctgagcccccaaccccaccggtcgttggagaaagaggaaaaggagaaaaatatttggttcttcccttctctcgtagccgacatgatccttccgcgctttgtgttgttcttgtttacttgatctgatgatgattaatgtggcccgatctgcgtatctgcctgcttgctgctggcgatagatgatgattgctgcgtctcgcagcagctcgctgtggttgtgctgttgtaatatagcaacattttacttgcttccttcctgtgaggaagcagacagctaaagtaacttattttcaatctttagctacaaaaaaaaaaaaaaaaaaaaaaaaaaaaaa

SEQ ID NO: 204 - protein, 223 aa, Oryza sativa
LTPFPIPTASIPIPISSIPELGAGMRRGGAAEEDAEAARFRGVRKRPWGRYAAEIRDPAKKARVWLGTYDSAEDAARAYDAAARALRGAKAKTNFPLSLPHAQPQLHHHHHHHLTYPAAAVVAARPATSSLSSTVESFGTRPRPVLPPRPPPPPPIPDGDCRSDCGSSASVVDDDCADAAASPSCRLPFQFDLNLPPGGGGGGGGGFGCAYDDEELRLTALRL

SEQ ID NO: 205 - DNA, 1113 bp, Oryza sativa
ccaccaccccctcatccgcaacaccgcagctgcacccgcatccgcaccgcaccatcagcgcgcaccaagaaagaaacacggagaaaagaaagatcgccatggcgccgagaacgtcggacaagactatgtcaccggcggccgcggccaccggactcgcgcttggcgtgggcggtgtcgccggagccgccgccgtgggcaccggccagcacttccgtggcgtgaggaagcggccgtggggccgttacgcggcggagatccgcgacccggccaagaagagccgcgtgtggctcggcacgttcgacacggccgaggaggccgcgcgcgcctacgacgccgcggcgcgcgagtaccgcggtgccaaggccaagaccaacttcccctaccctaacggcgcgcccgccgccggtgtgaacagcggcagcagcaacagcagcaccgtcgagtcgttcggcagcgacgtgcaggcgcccatgaaggccatgccgatcccgccgtcgctcgagctcgacctgttccaccgcgccgcagcggccgcggccgccggcgcaggcggcatgcgtttccctttcgagggctaccccgtatcgcacccttactacttctttggacaagcggccgccgccgccgccgcctctggttgccgcatgctcaagattgcgccggcgccggtcaccgtggccgccttggcacagagcgactccgactcctcgtcgatcgtggatctggcaccatcaccgcccgccgcgttggcgaagaaagccatcgcttttgatcttgatctgaactgtccgccgccgatggaggtctagcagccggagtttttacatgatgaccgctagttcatttatttctttttaatttttagtagtagaaaaattccgtgtacctcttatgcctagaccctcttgcttaactgagggaagacatttttgtaaatagtttttttcgccggcgatgtagtttaagagaagatcacaccatgtgtgtcacctaagacatatcctgccggcgttgttatggagcgggattatatatgtattattattattttgatagtcatgagaaactatgtagaaacccttctaagaaaaaaaaaaaaaaaaaaaaaaaaaa

SEQ ID NO: 206 - protein, 268 aa, Oryza sativa
TTPSSATPQLHPHPHRTISAHQERNTEKRKIAMAPRTSDKTMSPAAAATGLALGVGGVAGAAAVGTGQHFRGVRKRPWGRYAAEIRDPAKKSRVWLGTFDTAEEAARAYDAAAREYRGAKAKTNFPYPNGAPAAGVNSGSSNSSTVESFGSDVQAPMKAMPIPPSLELDLFHRAAAAAAAGAGGMRFPFEGYPVSHPYYFFGQAAAAAAASGCRMLKIAPAPVTVAALAQSDSDSSSIVDLAPSPPAALAKKAIAFDLDLNCPPPMEV

SEQ ID NO: 207 - DNA, 1089 bp, Oryza sativa
ggcacgaggttctaaccacacacccaaacccaacctcccaaaacacccacccggtttaccagagatccgcgcccgccacttgtaaacctgctgcacccatggcgcccagagcagctacggtggagaaggttgctgtggcgccacccaccgggcttggtcttggcgtcggcggaggtgtcggagccgggggtcctcactacaggggcgtccgcaagcgcccgtgggggcgttacgcagcggagatccgtgaccctgccaagaagagccgggtgtggctcggtacctacgacacggcagaggaggccgcccgcgcctacgacgccgccgctcgagagttccggggtgccaaggcaaaaacaaactttccgtttgcatcacagtcgatggtcggctgtggcggcagccccagcagcaatagcacggtagacaccggtggcggcggggttcagacgcctatgcgggccatgcctctgccgccgactctggacttggatttgttccaccgcgcggctgctgtgactgcagtcgccggcaccggcgttcgctttcctttcagaggatatcccgttgcacgtccagcaacgcatccttactttttctatgagcaggctgcagcggctgccgcagctgaggctggataccgtatgatgaagcttgcaccgccggtcaccgtggcggcggttgcacaaagtgactccgactcctcgtcggtggttgatctcgcgccgtcacctccagcggttacggcgaacaaggcggcagctttcgatctggatctgaaccggccgccgccggtagagaactagctcaggatgggttagctgacgactttgtagtttctctcttattttcttctttgatggatatttctctccgatgttttggtcctctgtgtttttgtttagtagcctgtgagagacggaagagccttgtaaatagtttttctgccgagggcgaaattcatcttgggatctgttaattagaacagatcatgccggcgatgagatggactaaaccgtggagtgtatgtattcctttatattagtatgaagaaattattcagaaagtcacaaaaaaaaaaaaaaaaaa

SEQ ID NO: 208 - protein, 265 aa, Oryza sativa
VLTTHPNPTSQNTHPVYQRSAPATCKPAAPMAPRAATVEKVAVAPPTGLGLGVGGGVGAGGPHYRGVRKRPWGRYAAEIRDPAKKSRVWLGTYDTAEEAARAYDAAAREFRGAKAKTNFPFASQSMVGCGGSPSSNSTVDTGGGGVQTPMRAMPLPPTLDLDLFHRAAAVTAVAGTGVRFPFRGYPVARPATHPYFFYEQAAAAAAAEAGYRMMKLAPPVTVAAVAQSDSDSSSVVDLAPSPPAVTANKAAAFDLDLNRPPPVEN

SEQ ID NO: 209 - DNA, 522 bp, Glycine max
  unsure (456)
  unsure (518)
cccacacgcttcttactcctctcataacttttctgctccccgttgagaaagatttgaatccaaaggaaaaataacgctaatggctccaagagacagccgagccaccgcgctcattgggcccggcccaagcctatcaccggcccacaaagagatccgctacagaggcgtcaggaaacgcccctggggccgctacgccgccgagatccgcgatcccggcaagaaaacccgcgtctggctcggcactttcgacaccgccgaggaagccgcgcgcgcctacgacaccgccgcgcgtgagtttcgtggcgccaaggccaagaccaatttcccgacaccctcggaactcatccttaacaacaacaacataaacgctcgtagtccccagccagaccagcaccctcggactcatcctctcccccgccaccggccaccgctagaccttaccctcaaccctctctncctccggctgttcttcccggtgggcgcggtcctgttcctattcttcgacgcattcgcgcgtngcgg

SEQ ID NO: 210 - protein, 130 aa, Glycine max
  UNSURE (126)
MAPRDSRATALIGPGPSLSPAHKEIRYRGVRKRPWGRYAAEIRDPGKKTRVWLGTFDTAEEAARAYDTAAREFRGAKAKTNFPTPSELILNNNNINARSPQPDQHPRTHPLPRHRPPLDLTLNPLXLRLF

SEQ ID NO: 211 - DNA, 1531 bp, Glycine max
gcacgaggaaagtatcactactgttactatttttggttttctattttatcacatacacatggaggaagcaatgaggcgtctcaacggggtagctccgattatcggacccgactcgaaaggcgacggtggactcatcgccaataacccgaaacggacctcggccgtgaacaagagggctttaagagaagacggcggcggtggtggcggcggcggagcgatgaggtaccgcggcgtgaggcgcaggccgtgggggcgttacgcggcggagataagggaccctcaatcgaaggagcggcgatggctgggaaccttcgacacggcggaggaagccgcttgcgcctacgactgcgctgctagagccatgaggggtctcaaagctcgcaccaacttcgtttacccaacttctccgcaaccttcttccgccaccaccgaacacttgttccctaacttcaacaacaacaacaactttcacaaacactcactcttcaatcaccaccgtaaccgccacataaccggttccaacacttgttttgaccaccctcactccgttgacttttcagcccctcgaaacccttcttctctcaacatgcttctctttcgtgaccttattcactctaacccttctttgctttcttcttcttccactcagaacttccacgaccagttttacaacaagagtacttctactttttcatcgttacctgtttctccttctcttgctccccctagttattcgatgaataattcttgtggaggctctttgtctgttaagatgaacacgtttcccacttgtggaactaattttgctgaaaaaggtgatgatggtgatggttttttctctcgtgagtcttcggattcggggttgttggaggagatagttaacaagttcttgcctagaacgaagcctagtaaatgcgagactacttttgcaaatcctcaggaggagtcgcttcttctccctccgcttgtttctgaatcaacgcttgtttccaccgggcaacaatactatgatgatgacatgaaaaaagggtttccaaagaacgagggtctaggtgttttttattctgatcaaggttttcccatgcagcaattcgacacctctaatgggtttaatagcatggctatggagaatgatcaaaacattattaataatgcagagaactgtgtcgttgaagatgtttttcagtaccaagagcttcttaatgctttcgcaatcagaatgcaaaatgcttaattagttaacatttccagtgtctgcatctcaatgctagttgtgtatgtagtcatgttgaatctgtcacttctcaatgttggtctggcctttcaattagaaacttattaatcattagggccttttgttcctaggtttaattaaccaggttattttgttcgtgcttactatgtagtattatgcccctctggcttccttccagtagtattatgtatggaactatggataatttgaaagcaatatatttttagtattggtattttgggtaaaaaaaaaaaaaaaaaaaaaaaaaaaaaaaaa

SEQ ID NO: 212 - protein, 391 aa, Glycine max
MEEAMRRLNGVAPIIGPDSKGDGGLIANNPKRTSAVNKRALREDGGGGGGGGAMRYRGVRRRPWGRYAAEIRDPQSKERRWLGTFDTAEEAACAYDCAARAMRGLKARTNFVYPTSPQPSSATTEHLFPNFNNNNNFHKHSLFNHHRNRHITGSNTCFDHPHSVDFSAPRNPSSLNMLLFRDLIHSNPSLLSSSSTQNFHDQFYNKSTSTFSSLPVSPSLAPPSYSMNNSCGGSLSVKMNTFPTCGTNFAEKGDDGDGFFSRESSDSGLLEEIVNKFLPRTKPSKCETTFANPQEESLLLPPLVSESTLVSTGQQYYDDDMKKGFPKNEGLGVFYSDQGFPMQQFDTSNGFNSMAMENDQNIINNAENCVVEDVFQYQELLNAFAIRMQNA

SEQ ID NO: 213 - DNA, 1036 bp, Glycine max
cacgcttcctactcctctctttcaccacttttctgctccccgttgagaaagaatttgaatcatcaaaatcaaaaacacgcaccaacaatggccccaagagacagccgagccaccgcgttcgccggcccaggcccatcaccggcccacaaagagatccgctaccgaggcgtccggaaacgcccctggggccgctacgctgccgagatccgtgaccccggcaagaaaacgcgcgtctggctcggcaccttcgacaccgccgaggaagccgctcgcgcatacgacaccgccgcgcgtgagtttcgcggtgccaaggccaagactaattttccgacaccttcggaactcatccttaacaacaacattcgtagtcccagccagagcagcaccctcgactcttcctctcccccgtcaccgccaccgccgcttgaccttaccctaacccctctctccgtggccgccgccgtcttcccggtggctcgtccggttctattttttgacgcgttcgcgcgtgcggacgccatgatcgccgtctcccgccgcgagacgtgcggcttcgagcgccccgccgctgatttccgccgtaacgactccgattccgattacaaccgccgcgtgctcctggatcttgacctgaacgtgcctcctctccctgaggttgcctgattcatgcagggagatctggttttccgcaatttttttcgtactacctttttaagcatctgggaacactactacgcatttttttgtgacgaaattgctctcgagaaattatagtgttacggagagggagcagcagctaagtgtgagtagtggatgacatgatgctcggaattgttgttgaccattttgtgatgaagatataatcggcacgttatgtaaatacacgttataaccgaaaagcaaacgcgctttttcttgcttttttttgcaactgagaacttaacagagtatctcatggttgtttctgtaatttctcaaaatatataaatatttccatttccatccttttattattaacaaaaaaaaaaaaaaaaaa

SEQ ID NO: 214 - protein, 220 aa, Glycine max
HASYSSLSPLFCSPLRKNLNHQNQKHAPTMAPRDSRATAFAGPGPSPAHKEIRYRGVRKRPWGRYAAEIRDPGKKTRVWLGTFDTAEEAARAYDTAAREFRGAKAKTNFPTPSELILNNNIRSPSQSSTLDSSSPPSPPPPLDLTLTPLSVAAAVFPVARPVLFFDAFARADAMIAVSRRETCGFERPAADFRRNDSDSDYNRRVLLDLDLNVPPLPEVA

SEQ ID NO: 215 - DNA, 837 bp, Vernonia mespilifolia
cttttttctcattacccatggctcctcgcgataaacctgacgccaccaccgccgccgctaatggcgccaaagagtctcgctttcgtggtgtccgtaagcgcccttggggacgttatgcggccgagattagagatcccggtaagaaaacccgtgtttggcttggtactttcgatacacccgaggaggccgctcgtgcttacgattccgccgcccgtcagtttcgtggcgctaaagccaaaactaacttccctttccatacggatttggttcttccgaccgccgtcaaaggcgtggccaggagccctagcgagaatagcatcgttgaaacgccgatccccgcagctccgcttccgcctgaagcactggaccttagcctgtcgcattattccgttggatttccgatggctcgttcgttgctattgtatcattcacagcaggtgaataacaaccgtctcagatcggacagattggtcgtccgcgatcccaaactaaacgtcggtgccggtggcgtcgttcagagtgattccgactcctcctcacaggtgatcaattatagttatcattcggtgcgtccaaaacaagagaaatccctaactttggatctggatctgaattttccaccaccggaagttgcctgatgatttcttctttttgtttagatcagatttaacaaaggcaaaaaagtgttaggagtagtgcaggctgcctgataatgttttgatgataaatgcttctatgattttgtacatacatcaaaggaaaggaaaaaccacacagatttcctttgatttttgcatctaaaaaaaaaaaaaaaaaaaaaaaaaaaaaaaaaaaaaa

SEQ ID NO: 216 - protein, 211 aa, Vernonia mespilifolia
FFSLPMAPRDKPDATTAAANGAKESRFRGVRKRPWGRYAAEIRDPGKKTRVWLGTFDTPEEAARAYDSAARQFRGAKAKTNFPFHTDLVLPTAVKGVARSPSENSIVETPIPAAPLPPEALDLSLSHYSVGFPMARSLLLYHSQQVNNNRLRSDRLVVRDPKLNVGAGGVVQSDSDSSSQVINYSYHSVRPKQEKSLTLDLDLNFPPPEVA

SEQ ID NO: 217 - DNA, 817 bp, Triticum aestivum
cccaccccacccccccaccccgcatcaccaaaacgcccgcataaccaaaaagatacgcgcacgccacttatacacctgctgcacccatggcgcctagagcggcggagaaggcgcctgtctccccgcccaccgggctcggcctcggcctcggcggcggggtcggggtcgtcgccgggggcgcgcactacaggggcgtccgcaagcgcccgtggggacgttacgccgcggagatccgtgacccggccaagaagagcagggtgtggctcggcacgtacgacacggcggaggaggccgcgcgcgcctacgacaccgccgcgcgtgagttccgcggcgccaaggcgaaaaccaacttcccgttcccttcgtcgtcgtcgtcgtcccctgtcgccggcgccggcggcggcggcagcccgagcagcgacagcaccttggactcgagcggcggagggagcggcggctgcgcccaggcgcccatgcaggccatcccgctgccgcccgccctcgacctggacctcttccaccgcgcggcggccgtcacggcggtcgccggcggcggcatgcgcttcccattcaacggttacccggtggcgccgcgccagcccatgcacccgtacttcttctacgaacaggccgcagcggcggcggcggcggcgtcggggtaccgcgcgctgaaggtggcgcagccggtcaccgtggcggccgttgctcggagcgactccgactcctcgtcggtcgttgatctgtccccgtcgccccccgcggtgacagcgcataaggcggtcgcgtttgatctggatctgaaccggccgccgccttc

SEQ ID NO: 218 - protein, 246 aa, Triticum aestivum
MAPRAAEKAPVSPPTGLGLGLGGGVGVVAGGAHYRGVRKRPWGRYAAEIRDPAKKSRVWLGTYDTAEEAARAYDTAAREFRGAKAKTNFPFPSSSSSSPVAGAGGGGSPSSDSTLDSSGGGSGGCAQAPMQAIPLPPALDLDLFHRAAAVTAVAGGGMRFPFNGYPVAPRQPMHPYFFYEQAAAAAAAASGYRALKVAQPVTVAAVARSDSDSSSVVDLSPSPPAVTAHKAVAFDLDLNRPPPSED

SEQ ID NO: 219 - DNA, 859 bp, Triticum aestivum
gcacgaggcttcattctccctcgttccatccaagctccaccatccatcactgatttgcacttacctagctactccgcaacccccacttccggcttcttcatttctcactactagtacgtagttgagattatggagggcggagaaggatccggtggcggcggcgagccgaccaagtaccgcggggtgcgccgcaggccgtggggcaagttcgccgcggagatccgggactcgagccggcacggcgtgcgcatgtggctcggcaccttcgacaccgccgaggaggccgcggccgcctacgaccgctccgcctactccatgcgcggccgcaacgccgtgctcaacttccccgaccgggcgcacgtctacgaggccgaggccaggcgccagggccagggctcttcgtcgtcggcgaggcagcagaatcagcagcagcagcaggggcagagcggggtgatcgagttcgagtacctggacgacgacgtgctgcagtccatgctccacgaccacgacaaatccaacaagtagatcgatggatcatccatccatccatccatggatcgatccataatacctactgtatcatcccggcccggccggcaacatcgacctgcgtgcatgcgcgggcgcggatgcaatctacactacctacctatgcattccggccatatattaggtacgtagattatatgtgtacgagagcctacgagctcgatgaagatcgtacgtggtgcattctgatgcatgaggattccatcgacacgaccctctaccatatatttgatgggtcgatcgagtaatttgcagccagtaatccaatcgatgatatggggttttcaaaaaaaaaaaaaaaaaaaaaaaa

SEQ ID NO: 220 - protein, 131 aa, Triticum aestivum
MEGGEGSGGGGEPTKYRGVRRRPWGKFAAEIRDSSRHGVRMWLGTFDTAEEAAAAYDRSAYSMRGRNAVLNFPDRAHVYEAEARRQGQGSSSSARQQNQQQQQGQSGVIEFEYLDDDVLQSMLHDHDKSNK

SEQ ID NO: 221 - DNA, 494 bp, Dimorphotheca sinuata
  unsure (417)
  unsure (470)
  unsure (490)
aatcaatgcagcagcacatgcacatctgaacagttttctctctctaacttcttctctttgatctagagagagaaagtgtagagagagaaagaggaaatggcgatggttgacgatcaatcggaaacttgcctcgtcatcggaggcagaaatagcttccttgggagatgtcttgttgttaggttattgaagctaggtcattggatcgtccgagttgccgattccactcactcactccaactcgatctctccgatcataactatgacttgcctctaaatcaagctctctctactggccgtgcttcctatttccattttgatgtgcaaaacactaattccatcatcaatgctattgaagggtcatcaagttgggttttatgtgggatgaagatgattactgcaatctcgaattcctttccngggtacacgataaattggtcaaaggcgtgaaaaatggcaacaatggcttgtcnaagaatgcaacaattaaacnggtt

SEQ ID NO: 222 - protein, 99 aa, Dimorphotheca sinuata
MAMVDDQSETCLVIGGRNSFLGRCLVVRLLKLGHWIVRVADSTHSLQLDLSDHNYDLPLNQALSTGRASYFHFDVQNTNSIINAIEGSSSWVLCGMKMI

SEQ ID NO: 223 - DNA, 727 bp, Zea mays
  unsure (559)
  unsure (655)
  unsure (675)
  unsure (700)
  unsure (710)
  unsure (718)
  unsure (725)
tttccatatggctgctccagattcatccatcaacaacttccaccttcattatggagtcaatgtcgatggaacaaagaatgttattgacacttgtatccgttgcaaggtgaagagactcatctatactagttcacctagtgtcgtgtttgatggagttcatggaatttttaatgcagatgaatcaatgccttacccagataagtttaatgattcatattcagaaacgaaagcggatgcagaaaagcttgtgatgagagctaatggtagggaagggcttcttacatgctgtatacgcccaagtagcatttttggccctggtgataagctaatggttccatctttggttgctgctgcaagggcagggaagtccaaatacattattggtgatgggaacaactactatgatttcacctacgtggaaaatgtggcatatggccatgtttgtgcagagaaaactctatcatctgaagatggtgcaaagatagccgctggaaaaacctatttcataacaaatatggagcctataaaattctgggagttcatgtcattgattttagangctggatatgaaaggccttcagtaaaatacagtctctgtatgatgcagtgctcatgttgtgaatgacttacagaattgcaagttgaatgaagtccnagtgacccttcaaggtcagntgcttcatgtacaggcatcagtgcnaagacaaggncacttgtntgacccngt

SEQ ID NO: 224 - protein, 201 aa, Zea mays
  UNSURE (186)
FHMAAPDSSINNFHLHYGVNVDGTKNVIDTCIRCKVKRLIYTSSPSVVFDGVHGIFNADESMPYPDKFNDSYSETKADAEKLVMRANGREGLLTCCIRPSSIFGPGDKLMVPSLVAAARAGKSKYIIGDGNNYYDFTYVENVAYGHVCAEKTLSSEDGAKIAAGKTYFITNMEPIKFWEFMSLILXAGYERPSVKYSLCMM

SEQ ID NO: 225 - DNA, 705 bp, Zea mays
  unsure (351)
  unsure (390)
  unsure (499)
  unsure (530)
  unsure (535)
  unsure (564)
  unsure (620)
  unsure (631)
  unsure (634)
  unsure (660)
  unsure (668)
  unsure (684)
  unsure (688)..(689)
  unsure (697)
gtgcgtgctgcgacctagcaatcttttcggttccgggtgattccagcttggtgaggtttgttgctggatatgcaaggtctcccttgggcaagtttgtaataggcagtggcagtaacatgtctgactttacctatgtggaaaatgtggcccatgccaatatttgtgctgagcaagccttgtcttcaaatgcagcttctgtagctgggaagcccttttttgttaccaatgacgaacctatggaaacatgggagtttatgaattgcatgatggaagccatgggttgtcagaggcccaggattaacctcctgccaagatgttattgtttgcagccttgttctccaaaatgatcancacaggcttgggtttcaaatgcttccaccctcttctcanccagatacaatatactcctgtccgtgtacgagaactttaacacttcaagaccaagaagattactggatacaaccaatgtacatgggaggatggattatgagatctgggnattcaaaacacagaaattggggtgcaaaaanaggcncgtggtctcaagaaataacgcaggatganactgcgaatctcttgaggataaaaaccttattgaatatgtcgcttcaggtccgctnaaaaatttttncangcaatttcagcccctgcctacagggngcccaaantggttacaagcacgtnttannccccatgnacctttgg

SEQ ID NO: 226 - protein, 91 aa, Zea mays
PGDSSLVRFVAGYARSPLGKFVIGSGSNMSDFTYVENVAHANICAEQALSSNAASVAGKPFFVTNDEPMETWEFMNCMMEAMGCQRPRINL

SEQ ID NO: 227 - DNA, 422 bp, Hevea brasiliensis
ctctacgctacgctctctctctctctctgattatatcgatttcgttttctctctctctctctgtggtcgttaatggcgatcgaggttccatttggggatttaaaccctaagacctgcgcggttcttggagggcgagggtttctaggaagatcgctcgtcttcaccctccttaaactgggtaactggatcgttcgagtctccgattcccctcactctttgcaactccacctcactgactcttctgactcctttcttaacgacgccatctcttccggccgtgcttcctgccatcgtcttgatgttctcgacgtctcttcaatcgtcaaagctattgagggtgcatctgtagtattttatatggaagctactgatttatggaatcaagaattctaatattgctacaaaattatagttcaaggggg

SEQ ID NO: 228 - protein, 116 aa, Hevea brasiliensis
  UNSURE (107)
MAIEVPFGDLNPKTCAVLGGRGFLGRSLVFTLLKLGNWIVRVSDSPHSLQLHLTDSSDSFLNDAISSGRASCHRLDVLDVSSIVKAIEGASVVFYMEATDLWNQEFXYCYKIIVQG

SEQ ID NO: 229 - DNA, 757 bp, Zea mays
  unsure (8)
  unsure (67)
  unsure (698)
  unsure (709)
  unsure (752)
gcggactnttgggcggacgcgtgggcgcgggtccgaggtcaggcagcagcagcacggagtagcaccngggcgaccgcccaggttatcgtcggccgccggcgacctgtaccccggcgaggagatgcatctgagcgcgaacgaggggatcgagggtctgcgattcgcggtgacgggcgggcagggcttcgtcggagctgccctcagcctcgagctgctccgccgcggtgcccgcgaggtccggtccctcgatctccgcgcctcctcctcctggtcccagcagctcctcgacgccggcgtccgaatcatccaaggggacataagaaagaaggatgatgtgcggagggctttccgtggagtggactgtgttttccaccttgcttcttatggcatgtcagggaaggagatggtgcagactgcgagatctgatgaggttaatataaatgggacctgcaatgtactggacgcttgccatgagcaaggtgtcagaaggcttgtgtatgtaagcacataccatgtggtatttggaggaaagccgattgtcaacggaaatgaagcgttgccttattttccgattgaagaccatgttgatgcttatgggcgcagcaaatcaattgctgaacaagctgtactgaagagtaacgggccgggcagctaaaatgataaaagtagcgctttttcatgggcaattgcctggtgtnttatggccagngaaaagggatttcaaaatctggccttgaagtggataacttttnaaatg

SEQ ID NO: 230 - protein, 176 aa, Zea mays
MHLSANEGIEGLRFAVTGGQGFVGAALSLELLRRGAREVRSLDLRASSSWSQQLLDAGVRIIQGDIRKKDDVRRAFRGVDCVFHLASYGMSGKEMVQTARSDEVNINGTCNVLDACHEQGVRRLVYVSTYHVVFGGKPIVNGNEALPYFPIEDHVDAYGRSKSIAEQAVLKSNGPG

SEQ ID NO: 231 - DNA, 504 bp, Glycine max
  unsure (477)
gttaatcagaaatcagaatgcacttgagcgagaacgaagggatagaggggaaggccttcgtggtcaccggtggactgggattcgtaggatctgctctctgcttggagctcatccgaagaggtgctagagaggtgcgagcctttgacctccgcctctcttctccatggtcgcgtcctctcaaggtcaagggagtcctttgcgtccaaggggatgttgcccgcaaagaagacgtggaaagggtcctccgcggttccgactgcgtattccaccttgcggccttcggaatgtcaggcaaagagatgctccaatttggtcgcattgatgaagtcaacataaatgggacttgccatgttatcgatgcttgcctccacctcggcatcaaaaggcttgtctactgtagcacaaacaatgttgtctttggcggtcaacagatcatcaacgggaatgagacattgccctaattcccaaattgatcancaagtccattcaaatgggcgcagtaaa

SEQ ID NO: 232 - protein, 147 aa, Glycine max
MHLSENEGIEGKAFVVTGGLGFVGSALCLELIRRGAREVRAFDLRLSSPWSRPLKVKGVLCVQGDVARKEDVERVLRGSDCVFHLAAFGMSGKEMLQFGRIDEVNINGTCHVIDACLHLGIKRLVYCSTNNVVFGGQQIINGNETLP

SEQ ID NO: 233 - DNA, 884 bp, Triticum aestivum
  unsure (739)
  unsure (789)
  unsure (880)
cagatattttattgccggaaaatgcataatgctaataatttagcgcggcactgaaacacctccacggccttgatgctcacttgacaattgaaaaacgcatcatcatcctagaccgcaatcctgtttaaacggtgatcaatataaacgggacgtgcaatgtactggatgcttgccatgagcatggtgtcagaaggcttgtgtatgtaagcacatacaatgtggtgtttgggggaaagccaattgtcaatggcagtgagacgttgccttattttcccatcgaagaccatgttgatgcttatgggcgtagcaaatcgatagctgaacagttggtgctgaagagcaatggtcggcaagctaagagtaataaaggtacccgtctttatacatgtgcaatacgcccggctgctatctatggtccaggtgaagagcgtcatcttccaagaatcctgtctcttggaaaattgggattagcatctttcaggattggggctccaaatgtgaagacagattgggtctatgctgataatcttgttcttgcactgatattggcaagtatgggccttttagatgacattcctggcaggaagggaactcctgtagcagctggtcaagcatacttcatatgtgatggagcgcctattaatagtttcgattttatcatcagtcccttatttcgaagtttgggctatgctgttcctcgaagttacactagatacctctgttgccctcgcaatttcangaatcattttgttcatgtccacactactctatccatgggttagatagtanatggattcctcagcctcttattctcctgctgaagtatacaaggtaggtgttacacattacttttcatatctgaaagctaaagaggactcgntacg

SEQ ID NO: 234 - protein, 175 aa, Triticum aestivum
ININGTCNVLDACHEHGVRRLVYVSTYNVVFGGKPIVNGSETLPYFPIEDHVDAYGRSKSIAEQLVLKSNGRQAKSNKGTRLYTCAIRPAAIYGPGEERHLPRILSLGKLGLASFRIGAPNVKTDWVYADNLVLALILASMGLLDDIPGRKGTPVAAGQAYFICDGAPINSFDFI

SEQ ID NO: 235 - DNA, 1732 bp, Zea mays
gcacgagggcctgtttgcagcagcaagcgttcaagaaatcaagcggccgcctcgtcccctccgcgcccggcgcctccgacgcccaagcagcgtgaccgtggaagggacgaagaagagcaccctcaagcggccgcactaatcccaaaccggcctccgacccccaagcagcctcacgctgctcgatggcggcgccgtatcaccagcctacgagcctggaggaggtccgcactctgtggatcggcgacctccagtactggaccgacgagaactacctctacagctgcttcgctcacaccggggaggtacaatctgttaaaataatacgcaacaaagtaacaagccttcctgagggttatgggtttatagagtttgtttcacatgaagctgctgagaaaattctccagacttacaatggcacacagatgcctggaactgaacacacattcagattgaattgggcctctttcagctctggtgagaggcgccctgatccaggatctgatcattcgattttcgtaggggacttggcacttgatgtcacagattacttactacaggaaacattccgagtgaactattcatctgttagaggtgctaaggttgtcacggatccaaataccgggagatctaaaggatatggatttgtaaagttcgcagatgaaaatgaaaagaaccgtgcaatgacagaaatgaatggtgtgtactgttcaacgagacctatgcggataagtgctgcaatacctaagaaatccactggctctcagcttcagtattcagctgctaaagcggtgtatccagcaacagcgtatgcaatgcctcagctccaggcagttctccctgacagtgatcctacaaacactacgatatttattgggaatttggacccaaatgtgatagaagatgagctgaggcagatatgtgtacagtttggagaacttatatatgtgaaaattcctgttggtaaaggatgtggttttgtacagtatgcatctagggcatcagctgaagaggcagtacaacgtcttcatggcacaatgattggccaacaagctgttcggctttcatggggccgaagtcctgcgagtaaacaggattcatcagctgtgtggagtcagcaagcagatccaaatcagtgggcaaacacttactatggctatgggtatgatgcatatggatatgctcaggatccgtcatacgcttatggtgcttatgcaggatatagccaatatccccaacaggttgagggaactgttgacgccacttctgttgctggtagccatccaggcatggagcaaaaggaggagccatatgatccaatgaacatacctgatgttgacaagttgaatgcttcatacatggctgttcatggtagagccatgctagggcggtccttgtggttgaagaccaacccgctgccccaaccgacataagcatgtttcctcccccgaagactacagccagtgctggtgggcgcagctgggtttcatcgcgcagatgattttgcccttcccagtagtcacgttaaactctgaaattgttgtaggctggccagcagcttcgtctatattgagaacattcgatgtatgataggcgtgactcttttgtactgtatttcttaggctgttggttaatattattaggacaatattgagggagcggtgaaagtcaactgtctgtatttccaactgattattctgctgttcgatactcaaaaaaaaaaaaaaaaaaaaaa

SEQ ID NO: 236 - protein, 415 aa, Zea mays
MAAPYHQPTSLEEVRTLWIGDLQYWTDENYLYSCFAHTGEVQSVKIIRNKVTSLPEGYGFIEFVSHEAAEKILQTYNGTQMPGTEHTFRLNWASFSSGERRPDPGSDHSIFVGDLALDVTDYLLQETFRVNYSSVRGAKVVTDPNTGRSKGYGFVKFADENEKNRAMTEMNGVYCSTRPMRISAAIPKKSTGSQLQYSAAKAVYPATAYAMPQLQAVLPDSDPTNTTIFIGNLDPNVIEDELRQICVQFGELIYVKIPVGKGCGFVQYASRASAEEAVQRLHGTMIGQQAVRLSWGRSPASKQDSSAVWSQQADPNQWANTYYGYGYDAYGYAQDPSYAYGAYAGYSQYPQQVEGTVDATSVAGSHPGMEQKEEPYDPMNIPDVDKLNASYMAVHGRAMLGRSLWLKTNPLPQPT

SEQ ID NO: 237 - DNA, 1627 bp, Zea mays
ctggatcagaaggcaacctcagcggccgcaagcccgcaactttatccatccgtttggcccacgcgctccgcagtctcctctctcctcgggtggctagggttttgactcctagtcctaaaccagctcccacgccgccatgatgcagccgccgccgccacatcagcagcagcaatgggcaatggcgcccccgcccccgccgcagtactaccaggcggggcaccctccgccgccgcccccgcagttctaccaggcgggccctccgcctcccgctatgtggggccaaccgccaccgcaggcggcggcggcgccggcgccggccggcggcggggcgggggacgaggcgaggaccctctggatcggggacctgcagtactggatggatgagaactacctctatagctgcttctcccaggctggcgaggttatttccgtgaagataattcggaacaagcagactgggcaacctgagggttatggttttattgaattcagcaaccatgctgtagccgaacaagttctgcagaactataatggtcaaatgatgcccaatgttaatcaacctttcaaattgaattgggctaccagtggggctggtgagaaacgtggagacgatggttcagattatactatatttgttggggacttggcctcggatgttacagatttcattctacaagatacgttcaagagtcgttatccatcagttaagggtgcaaaagttgtctttgacagaactactggccgttcgaaaggctatggttttgtaaagtttgcagattcggatgaacagacacgggcaatgactgaaatgaatggacaatactgttctagcagggccatgcgccttggaccagcatccaacaagaagaatactggtggaccacaaccatcgagtgctatttaccagaacacccaaggaactgattctgatagtgatccgaacaatactactgtatttgttggcggccttgacccgagtgtgactgacgagcttctgaagcaaactttcagtccatatggagagcttctctatgtcaaaatacctgtaggaaagcgctgcggatttgtccaatattctaacagggcatcagctgaggaggccataagggtgctaaatggaagccagttgggaggtcagagcataaggctctcatggggccgtaaccctgcaaacaagcagcctcagcaagagcagagccaatggagcggtggtggctattatgggtatccccaaggatacgatccatatggctatgctcggccccctcaagatcctgccatgtacgcctacgcagcatatccagggtatggaaattaccagcaacagccaccacagcagcccccgccacaacagtaatgatgtcccgagagtgatcatttgcaagctggtcgcaaagtagctggggggttggggcgcagcaactttggtgcgttggcatgagaaattttgcggcggttgcttgtgttgtgttgtattgttccgacgcccttgtacacgtagcctgtgttgtaactgaatttttgccgaggccttatgagtgactagtgtttcaactgtaactggattgcacatttttgtcgcaaggaatgtactattattgtgtggctcgtgccgctttgaacgctg

SEQ ID NO: 238 - protein, 406 aa, Zea mays
MMQPPPPHQQQQWAMAPPPPPQYYQAGHPPPPPPQFYQAGPPPPAMWGQPPPQAAAAPAPAGGGAGDEARTLWIGDLQYWMDENYLYSCFSQAGEVISVKIIRNKQTGQPEGYGFIEFSNHAVAEQVLQNYNGQMMPNVNQPFKLNWATSGAGEKRGDDGSDYTIFVGDLASDVTDFILQDTFKSRYPSVKGAKVVFDRTTGRSKGYGFVKFADSDEQTRAMTEMNGQYCSSRAMRLGPASNKKNTGGPQPSSAIYQNTQGTDSDSDPNNTTVFVGGLDPSVTDELLKQTFSPYGELLYVKIPVGKRCGFVQYSNRASAEEAIRVLNGSQLGGQSIRLSWGRNPANKQPQQEQSQWSGGGYYGYPQGYDPYGYARPPQDPAMYAYAAYPGYGNYQQQPPQQPPPQQ

SEQ ID NO: 239 - DNA, 1848 bp, Zea mays
ccacgcgtccgggtttctctgcctcgccggggaagcgatgcagccgctgcaccaaccgccgatgaacgggcaacacggcccgcctcctccgcagggatccggggttcccacggcttcgcagcagcaggcgccaccgccgtcgtactaccagcagcagcagcagcagcagcaggggccaccgcctcagtactaccagcagggtcccccacagccgtgggcgcagcagcaacagtacgctccaccgccgccgcagtacccgcctcagatgcagcagtacgctccaccaccgcagcagtacgcccctccgccgcagcagcagtacgccgctccgccgcagcagcagtacgccgctccgccgccgcagtacgcgcctccgccgccgcagtacgcgcctccgccgcagcagtacgcgcagccgccgcagtacgcgcagccaccgcagtatgggacaacgccgggaagcggtgaggtcaggaccctgtggattggagatcttcagtactggatggacgagaactatctccactacaacgccttcgcgcctgtggcccagcagattgcctctgtgaaaattatacggaacaagcagactgggcactcagaaggttatggttttattgagttttactctcaagccgctgcagaacatactctgatgaacttcaatgggcagatgatgccgaatattgagatggcttttaagctgaattgggcttctgctagcactggggataagcgtggagataatggttctgaccatgcaatatttgttggtgatttggcccctgatgttacggactccatgttggaagatgtgttcagagctaactatccttcagttagaggagctaaagttgttgttgataggatcactggacggcctaaaggatatgggttcgtgcattttggagatctgaatgagcaggcacgtgctatgaccgagatgaatggaatgatgttatctacaaggaaaatgaggattggggctgcagctagcaagaagaatacagatgctcagcagacatatgcaactaatggtgcataccagagttctcaaggcaattgttcagagaatgatcccaacaatacaacagtctttgtgggtgggttagattccaatgtagacgaggagtatctaaggcaaatttttactccgtacggagaaatttcctatgtgaagattcctgtaggcaagcattgtggatttgttcaatttaccagcaggtcatgtgctgaggaagccatccaaatgctgaatgggagtcagattggtggacagaaagctcggctttcatggggccgtagtactcaaaacagacaggcttctcagcatgatgccaacagccagtataatgggaacaactattatcgataccaacagccgggtaatgaaggttatagctatggtgcacccaatgcacaagacccaagcattcaaaactactatggataccctggttatggtaactatgagcagcagtcaacacaggaacagcagcagcagcagcctccaccagcacaggagcagcctccaccggcaccacagtaacaatcatcgtggtgacgattgcttgggcacttctggaatgctatcagattagagggactacagtcagagcagtgccgtgccgaatgagacgtcctgaagatatggagggcatatagtcgcatgggtgttcttgggccggtgttaatctacgatgacactcctgatgtctcttttgtttgtcattgagatcttgacggctgaagtatgcaccgttgaaattgatgtattcgtcgtcgtcggattgtttatttgctcggaaccattttttgcactttaaaaaaaaaaaaaaaaaaaaaaag

SEQ ID NO: 240 - protein, 503 aa, Zea mays
MQPLHQPPMNGQHGPPPPQGSGVPTASQQQAPPPSYYQQQQQQQQGPPPQYYQQGPPQPWAQQQQYAPPPPQYPPQMQQYAPPPQQYAPPPQQQYAAPPQQQYAAPPPQYAPPPPQYAPPPQQYAQPPQYAQPPQYGTTPGSGEVRTLWIGDLQYWMDENYLHYNAFAPVAQQIASVKIIRNKQTGHSEGYGFIEFYSQAAAEHTLMNFNGQMMPNIEMAFKLNWASASTGDKRGDNGSDHAIFVGDLAPDVTDSMLEDVFRANYPSVRGAKVVVDRITGRPKGYGFVHFGDLNEQARAMTEMNGMMLSTRKMRIGAAASKKNTDAQQTYATNGAYQSSQGNCSENDPNNTTVFVGGLDSNVDEEYLRQIFTPYGEISYVKIPVGKHCGFVQFTSRSCAEEAIQMLNGSQIGGQKARLSWGRSTQNRQASQHDANSQYNGNNYYRYQQPGNEGYSYGAPNAQDPSIQNYYGYPGYGNYEQQSTQEQQQQQPPPAQEQPPPAPQ

SEQ ID NO: 241 - DNA, 1657 bp, Zea mays
gtgctagggttaggtcgtctcggcaagtcgccatgatgcagcagcccccgccgcagcagccgcagccgggtatggcgctacctcctccccctcagaccggtggcgggcagccaccgcagtggggcgcgatcccgccgccgatgacgcagcagtacggcgcaccacctccgcagcagcctccagcgatgtggggccagcctccgtcgcaggcgcactacgggcaggcgccgccccatcagccgtattatgccgcgccgccggtgccggtgcaggcgccagccgcccccgctgcggcggacgaggtcaggacgctctggatcggggacctgcaatactggatggacgagaactacgtcttcgggtgcttttcgaacactggggaggttcaaaatgtgaagctcatccgcgacaagaattcaggacagcttcagggctatggttttgttgagtttacaagccgtgcagctgcagaacgagttcttcagacatacaatggacaaatgatgccaaatgttgacttgacatttcggctgaattgggccagtgctggtgaaaagcgcgatgatactcctgaatatactatttttgttggggatttggctgcagatgttacagattacttgttacaagagacattcagggttcattatccctctgtcaagggtgcaaaagttgtgactgataaattgacaatgcgcacaaagggttatggatttgtgaaatttggtgatcctacagagcaagctcgtgcaatgactgaaatgaatggaatgccttgttcttccaggcctatgcgtattggtcctgcagcaagtaggaaaaatacaggaggtgttgttcaagagagagtaccaaattctcaaggagctcagtctgagaatgatcctaacaataccactatatttgttggtgggcttgaccccaatgtcactgaagataccctaaaacaagttttttctccttacggtgaagtcgtccatgttaagatccctgttgggaagagatgtggttttgttcagttcgttaccagaccttctgctgaacaagcgctgctaatgctgcaaggggccttgattggtgcacagaatgttcgactttcatggggtagaagcctgtcgaacaagcaggctcagcctcagcaggaatccaatcaatggggtgcggctgctggtgctggtggctactatgggggctatggacaaggttatgaggcttatggcagtgggtatgcacaaccccaggatcctaacatgtatggttatggcgcttatggcggttatcccaattaccaacagcaaccagctgcacagcagcaacagcaacaacagtgatgcctgtttgctcgggtaggtcattgggttgtcgcgacggaattaattaaatattatttcaggacactctcatattgcattcttgtcaattgaggtggttttgaaaggctcctgattttgatggccccatggcacggtttcatctatttattagtatatgacatatatgcgctgtgaacaagtggcgctctactgtgattgctgtgttgagacatgctttcttagtttctttccatgtttctcggatctgttgtgttacctttattactgtgtatttgcatatctactgtgatgctatatatgcactgtgccgcctttcgttcgtt

SEQ ID NO: 242 - protein, 432 aa, Zea mays
MMQQPPPQQPQPGMALPPPPQTGGGQPPQWGAIPPPMTQQYGAPPPQQPPAMWGQPPSQAHYGQAPPHQPYYAAPPVPVQAPAAPAAADEVRTLWIGDLQYWMDENYVFGCFSNTGEVQNVKLIRDKNSGQLQGYGFVEFTSRAAAERVLQTYNGQMMPNVDLTFRLNWASAGEKRDDTPEYTIFVGDLAADVTDYLLQETFRVHYPSVKGAKVVTDKLTMRTKGYGFVKFGDPTEQARAMTEMNGMPCSSRPMRIGPAASRKNTGGVVQERVPNSQGAQSENDPNNTTIFVGGLDPNVTEDTLKQVFSPYGEVVHVKIPVGKRCGFVQFVTRPSAEQALLMLQGALIGAQNVRLSWGRSLSNKQAQPQQESNQWGAAAGAGGYYGGYGQGYEAYGSGYAQPQDPNMYGYGAYGGYPNYQQQPAAQQQQQQQ

SEQ ID NO: 243 - DNA, 1287 bp, Zea mays
gcacgaggttgtggcaattaaagttatccggaataagcagaccggacagtctgaaggatacggatttgttgagttctacagccatgctgcagctgaaagggttcttgaagggttttctggtcatattatgccaaacactgaccagccctttaggttaaactgggcatcgtttagcatgggagataggcgctcggatgttgcttcggatcattccatattcgtaggcgaccttgcttccgatgtcaatgacgccacactgctggaggttttctccagcaggtactcctctgtcaaaggtgccaaagtcgttatcgatgctaacactggtagatccaagggttatggcttcgtgagatttggagatgacagtgagaagacgcatgccatgactgagatgaatggtgtgtattgctcctctaggcccatgaggattggcccggcaactccaagaaaatcatcaggtacctctggatcaaatggctcatctgctcgaccagatggaggagatttgacaaacacaacagtatttgtgggcgggctcgacccagatgtcagtgaagaggaccttaggcaggccttctcccagtacggagaaatttcttccgtaaagattccagttgggaaacagtgcggcttcgtgcagtttgctcagaggaagaacgcggaagacgcgttgcaagggttgaacggcagcactattggcaaacaggccgtgcgtctctcatggggtcgcaacccagcaaacaagcagtttaggggcgacaatggcaacatgcagtggaagaacgggggcgtgtactacgcggcgcccccgttctacaacggcggctacggctaccctgcggcggccccgttccctgatccaggcatgtacgctgctccagcctacggcgcctacccgttctatggcaaccagcagcaagtgagctgacctggactactgcgccggcctcgcttggaaagctggggcctggcctggcctggcctggagcggctgttaggtgtagctcttggtagaagaagatgaagtagacgacgacggtttcttaggtgagctagatatatataccttgactagtctcgtatagtgcgttttgttacacgtgctagctagggtctagcgccacccaccgagtgtccgacacacctattgactggccacgtacggtatgtcgaaatcaacgacaaaaggaattttcgatgacctggagctgcatgctgccttgaagcagcagaacaataaagctaatggaatcctttgcccctgcaaaaaaaaaaaaaaaaaaa

SEQ ID NO: 244 - protein, 307 aa, Zea mays
VVAIKVIRNKQTGQSEGYGFVEFYSHAAAERVLEGFSGHIMPNTDQPFRLNWASFSMGDRRSDVASDHSIFVGDLASDVNDATLLEVFSSRYSSVKGAKVVIDANTGRSKGYGFVRFGDDSEKTHAMTEMNGVYCSSRPMRIGPATPRKSSGTSGSNGSSARPDGGDLTNTTVFVGGLDPDVSEEDLRQAFSQYGEISSVKIPVGKQCGFVQFAQRKNAEDALQGLNGSTIGKQAVRLSWGRNPANKQFRGDNGNMQWKNGGVYYAAPPFYNGGYGYPAAAPFPDPGMYAAPAYGAYPFYGNQQQVS

SEQ ID NO: 245 - DNA, 1443 bp, Zea mays
gcacgaggtggagtcggagctcaactcatcaatagggtttgatcagcgctccgctcgtgctagccacccagcccccccgcgcccacttgcgacggcgatggcttcgccgtactcgctcagctgggccgacgcgccgccctaccactaccacgggagaccccagccagcgcccgactcacccgcatcctccgacggggccgggccccgctcgctctggatcggcggcctgctgccatggatggacgaggactacctctacggctgcttcaccacctcgcgcgagcttctttcccttgtcatcaaacggaacaagcagactggccaatcagagggctttggcttcctcaaattttctgaccataccgccgctgctcatattctcaagtcttacaatggtcagaagatgcctaacgctgttcaagatttcaagctcaactgggccacccaacaacctgctcccaagaaacttcctgatccagatttcaagctcgacctggccacacagcaggagaggcatgccgccgtcgattcctcatctgatcattccatattcgttggggacttggcctacaatgttacaggatacatgctacaccatgtgttcaaggcccgctacccatcagtgaagagcgcaaaaatcatctttgacaagttcactggcctctcaaaatgctatggatttgttcagtttggagatgtcgatgagcagatacaagcactgacagaaatgaatggagcctactgttctaccaggcctatgcggattggacctgttcccaagaagaaaaattctttccgcagcaaacagtggactgagtcttatcacgatgcaaacaattcaaggctatttgttgggcaacttgaccaaagtgtgacttctgaagatctgatgcaagcctttagtccatatggggagcttgttgatgtgaaggcattaccagggaagggctgtgggtttgtcacgtactctaacagggcatcagcagaggaagccattagaatgctgaatggaagtcagctgggaggtaaagccataaaactttcgtggggttacccttctgctgacaagcaggctcaaaggaacagcggcggcgggttcggacgcgactgcttcgtttggtctcctcagtatccctacgcttacgctcagacatgccaaccgggatatggatattaattaccgatagcaagctgcccacagtgcagtgagatcgtgtgaagaaagatgtcagtcacaaggaacagctgctagggtgtagagggatttttggtccatgttttttttctttttggaaattggttcctcctatggttgcataccgtgaagcatcggcatctggatccatacatgagaatgcaaacaacgattgaatgtacatttacacacatactgctactactatattaattactgtaccttgaaaaaaaaaaaaaaaaaaaaaa

SEQ ID NO: 246 - protein, 389 aa, Zea mays
VESELNSSIGFDQRSARASHPAPPRPLATAMASPYSLSWADAPPYHYHGRPQPAPDSPASSDGAGPRSLWIGGLLPWMDEDYLYGCFTTSRELLSLVIKRNKQTGQSEGFGFLKFSDHTAAAHILKSYNGQKMPNAVQDFKLNWATQQPAPKKLPDPDFKLDLATQQERHAAVDSSSDHSIFVGDLAYNVTGYMLHHVFKARYPSVKSAKIIFDKFTGLSKCYGFVQFGDVDEQIQALTEMNGAYCSTRPMRIGPVPKKKNSFRSKQWTESYHDANNSRLFVGQLDQSVTSEDLMQAFSPYGELVDVKALPGKGCGFVTYSNRASAEEAIRMLNGSQLGGKAIKLSWGYPSADKQAQRNSGGGFGRDCFVWSPQYPYAYAQTCQPGYGY

SEQ ID NO: 247 - DNA, 1799 bp, Zea mays
gcacgagcctcttcttccctccactcgcctccaaatcttctctctcctttcctcctctcgtctcaccgcatcacctctccctccggcgcgcgcgtccgggtacagcgctagagtcactcaccaccatgcaggcggcggcggcggcgaatggcgcgggcgacgtgcagaagcctcagcagcaaccgctggtggcgggggcgccgcccccaccgccgccggcggccgtggtgccgccccattgggtcgccatgccgttcgcaccgcctcccggggccgcggccatggtgatgcagccgcaccatatggcgcctccgccgccgcagttcgcgccgactcacttcgtgccgttccacgccgtcgcgccgccgcgggcacagtcggtgccagcagcggtcgcactgggttccccggcgccgcatcagcccgggcaggaggagaacaagagcgtctgggtcggcgacctccattactggatggacgagaactacctacacagctgcttcggctacaccggcgaggttgtggcgatcaaagttatccgcaacaagcagactgggcagtccgaaggatacgggttcgtcgagttctacagccacgctgcggctgaaaaagttctcgaagggttttctggccatatcatgccgaacaccgaccagcctttcaggctaaactgggcatcgtttagcatgggagacaggcgctcggattctgcctcggaccattccatattcgtaggcgaccttgcctctgacgtcaatgacgccacgctgctggaggccttctccagcaggtactcctctgtcaaaggtgccaaggttgttatcgatgctaacactggtagatccaagggctatggcttcgtgaggtttggagatgacagcgagaagacacaggccatgactgagatgaacggcgtgtattgctcgtctaggcccatgagaattggcccggcaactccgaggaaatcatcaggtacttctggatcgaatggttcagctgctcgatcagacggaggagatttgacaaacacaacggtatttgtgggtgggctcgacccaaatgttagcgaagaggaccttaggcaaaccttctcccagtacggagagatttcttctgtaaagattccaattgggaaacagtgcggcttcgtgcagtttgctcagaggaagaacgcagaggacgcattgcaaggattaaatggcagcactattggcaaacaaaacgtgcgtctttcatggggccgcaacccagcaaacaagcagttcagaggcgacaacggcaaccagtggaacaacgggggcatgtactacgcggcgcccccgttctacaacggctacggttaccctgcggcggccccgttccctgatccaggcatgtacgctgctccagcctacggtgcctatccgttctatggcaatcagcagcaagtgagctgacctggactaccgcgacacgcacgcctcgctcggagctggagactggaggtgttaggcgcttaggtgtagctctcggtagaagaagaagaggaagaaggtagacgacgacggtttcttaggtgagctagataccgtgactagtctcgtatagtgcgatttgttatacgtgctatggtctagcgccgccgacgactgagagtccgagtgtccgacacacctattgactggccacggcatgtcgaattgaacgacaaaaagaatttctgatgtcctggagctgcatgcatgctaccttgaagcagaacaataagctaatggaatcctttggcctctgctaaaaaaaaaaaaaaaaaaaaaaaaaaa

SEQ ID NO: 248 - protein, 436 aa, Zea mays
MQAAAAANGAGDVQKPQQQPLVAGAPPPPPPAAVVPPHWVAMPFAPPPGAAAMVMQPHHMAPPPPQFAPTHFVPFHAVAPPRAQSVPAAVALGSPAPHQPGQEENKSVWVGDLHYWMDENYLHSCFGYTGEVVAIKVIRNKQTGQSEGYGFVEFYSHAAAEKVLEGFSGHIMPNTDQPFRLNWASFSMGDRRSDSASDHSIFVGDLASDVNDATLLEAFSSRYSSVKGAKVVIDANTGRSKGYGFVRFGDDSEKTQAMTEMNGVYCSSRPMRIGPATPRKSSGTSGSNGSAARSDGGDLTNTTVFVGGLDPNVSEEDLRQTFSQYGEISSVKIPIGKQCGFVQFAQRKNAEDALQGLNGSTIGKQNVRLSWGRNPANKQFRGDNGNQWNNGGMYYAAPPFYNGYGYPAAAPFPDPGMYAAPAYGAYPFYGNQQQVS

SEQ ID NO: 249 - DNA, 1806 bp, Zea mays
gcacgagccgcacggcccacggcccacggcaagtctcccgcgaagtcgcaagtctcccgcacgaaccacgacaaatgtcaaccccgattcctcgccgtcgctcatctcctctctcccatctctgctagggttaggtcgtctcggcaagtcgccatgatgcagcagcccccgcagccgcagccgggtatggcgctacctcctccccctcagaccggtggcgggcagccaccgcagtggggcgcgatcccgccgccgatgacgcagcagtacggcgcaccacctccgcagcagcctccagcgatgtggggccagcctccgtcgcaggcgcactacgggcaggcgccgccccctcagccgtattatgccgcgccgccggtgccggccgcccccgctgcggcggacgaggtcaggacgctctggatcggggacctgcagtactggatggacgataactatgtcttcgggtgcttttcgaacaccggcgaggttcaaaatgtgaagctcatccgcgacaagaattcaggacagcttcagggctatggttttgttgaatttacaagccgtgcagctgcagagcgagttcttcagacatataatggacaaatgatgccaaatgttgacttgacatttcggctgaactgggccagtgctggtgaaaagcgtgatgatactcctgactatactattttcgttggtgatttggctgcagatgttacagattacttgttacaagagacattcagggttcattatccctcggtgaagggtgcaaaagttgtgactgataaattgacaatgcgtaccaagggttatggatttgtgaaatttggcgatcctacagagcaagctcgtgcaatgactgaaatgaatggaatgccttgttcttccaggcctatgcgtattggtcctgcagcaagtagaaaaaatgcaggtggtgttgttcaagagagagtaccaaattctcaaggagctcagtctgagaatgatcctaacaataccactatatttgttggtgggcttgaccccaatgtcactgaagatgtcctaaaacaagcattttctccttatggcgaagtcatccatgttaagatccctgttgggaagagatgtggttttgttcagtttgttaccagaccttctgctgagcaggcgctgctaatgttgcaaggggccttgattggtgcacagaatgttcggctttcgtggggtagaagcctgtcgaacaagcagactcagcctcagcaggaatccatgcaatggggtgcgggtgcgcctgctggtgttggtgattactatggtggctatggacaaggttatgaggcttatggcagtgggtatgcacaaccccaggaccctaacatgtatggttatggcgcttatgttggttatcccaattaccaacagcaaccagctgcacagcagccacagcaacaacagtgaggcctctttgctcgggtaggtcattgggttgtctgagatgggatcaattagtattatttctaggcattcatatattgatttcttgaaaatagaggtggtttcgaaaatctcctgattttgatggccccatggcatgttttcttcgagttatatcatatatatatgcactatgttatgtctatgaacaagtggtgctcaactgtgattgctatgttgaggcatgcttcgtagtttccttccagacttgtcttatatattgttctctcttttactctgtattgttatctctattagtgtgtattgcatatctactgcgatgctatatatgcgctgtgccgcctttcgttaaaaaaaaaaaaaaaaaaa

SEQ ID NO: 250 - protein, 428 aa, Zea mays
MMQQPPQPQPGMALPPPPQTGGGQPPQWGAIPPPMTQQYGAPPPQQPPAMWGQPPSQAHYGQAPPPQPYYAAPPVPAAPAAADEVRTLWIGDLQYWMDDNYVFGCFSNTGEVQNVKLIRDKNSGQLQGYGFVEFTSRAAAERVLQTYNGQMMPNVDLTFRLNWASAGEKRDDTPDYTIFVGDLAADVTDYLLQETFRVHYPSVKGAKVVTDKLTMRTKGYGFVKFGDPTEQARAMTEMNGMPCSSRPMRIGPAASRKNAGGVVQERVPNSQGAQSENDPNNTTIFVGGLDPNVTEDVLKQAFSPYGEVIHVKIPVGKRCGFVQFVTRPSAEQALLMLQGALIGAQNVRLSWGRSLSNKQTQPQQESMQWGAGAPAGVGDYYGGYGQGYEAYGSGYAQPQDPNMYGYGAYVGYPNYQQQPAAQQPQQQQ

SEQ ID NO: 251 - DNA, 1689 bp, Zea mays
gcacgagctccatccgaccacccccgcgagcttcgacagttcgacacacgcggccgccccttcccggctccagccacaccccccggaggcggcgatgcagatggcagcggcagttgcccccaccgacgccccggcctcggcgtctgcggcggcggcgccctcccgcccccacgcgcacgccgcggcagcggtggcggccgcgtcgcctcacccgcacgcactgcatccgcatcaccatatgccgcaaccgcggtgggtggtcatcccataccctcctccacaccatcccatggtggccgcgccgccgccaccttctctgcagtttgtgaagcattttacgccgccgtcctcggtaacaccgccgccgccgactggatccggcgggaacgggggcgaggataaccggaccatctgggtgggcgacctgcagtactggatggacgaaaactatcttcacagctgcttcggctctagcggcgaggtggtgaatattaaagtcattcgcaatagacactcgggagtttctgagggttatggttttatagagttttatactcacgtttcagcagagaaggcactgcagaatttttctggtcacgtaatgcctaatactgaccgggcttttaagttaaactgggcatcatatagtatgggagaaaaacgctcggaaatttcgtctgatcactcgatatttgttggcgatttggctgttgatgttactgatgcgatgttgctggaacttttttctaacaaataccgatcggtgaaaggagctaaagttattattgatgcaaacacaggccgttctagaggctacggctttgttaggtttggagatgataatgacaaaattcatgcaatgactgaaatgaatggtgtttactgttccacaagaccaattcgtgtaggaccagcgactcctagaagatctcaaggtgattctggcacttctccaccaaggcaatctcatgttgactctactaacaggacggtatatgttggtgggcttgaccccaatgttagcgaagatgaactgaggaaagcatttgcaaaatatggtgatcttgcctctgtcaaaattccttttgggaaacaatgtgggtttgttcaatttgtaaacagagttgatgctgaagaagcactgcatgggttgaatggatcaactattgggaagcaggcagttcgactttcctggggccgcagccctgcaagtaaacagtctaggggtgattctggccaccggcgcaatggcaactgcaacggcatgtactacgggacaccattctacggtggatatggctacgcctccccgattccgcacccaaacatgtacgccgcggcctacgaagcctacccgtactatgggaaccagcagctagtgagctgatgtagtgatgtggcgagatgctctctgctcagttttcctcccttggaggaaacgagtttttggtcccagtaaaagcatagtagctatgatgagatatatgataggtggccataaaaatgggcgcgagagacgagacaggcatatgatggtaacgctacctgcagatttgtgctgctagtagaacctaaaagagcttgtagtagacaaataaaaccttttcttttgtcttggaaattttgactcgctaataaaaagtgaagctatctgttgtaaaaaaaaaaaaaaaaaaaaaactcgctagt

SEQ ID NO: 252 - protein, 430 aa, Zea mays
MQMAAAVAPTDAPASASAAAAPSRPHAHAAAAVAAASPHPHALHPHHHMPQPRWVVIPYPPPHHPMVAAPPPPSLQFVKHFTPPSSVTPPPPTGSGGNGGEDNRTIWVGDLQYWMDENYLHSCFGSSGEVVNIKVIRNRHSGVSEGYGFIEFYTHVSAEKALQNFSGHVMPNTDRAFKLNWASYSMGEKRSEISSDHSIFVGDLAVDVTDAMLLELFSNKYRSVKGAKVIIDANTGRSRGYGFVRFGDDNDKIHAMTEMNGVYCSTRPIRVGPATPRRSQGDSGTSPPRQSHVDSTNRTVYVGGLDPNVSEDELRKAFAKYGDLASVKIPFGKQCGFVQFVNRVDAEEALHGLNGSTIGKQAVRLSWGRSPASKQSRGDSGHRRNGNCNGMYYGTPFYGGYGYASPIPHPNMYAAAYEAYPYYGNQQLVS

SEQ ID NO: 253 - DNA, 1620 bp, Zea mays
ccacgcgtccgcacccctccacacgaccctcctcggcggcggcggcggcgatgcagatggcggcgaccaccaccgagtcccaggcggccgtgccgcctcaacaccctcacgcccacccccacgcgcccccgcagcatgctcacccgcaccaccacatgccgcagccacggtgggtcgtcatcccgtacccgccgccgccgcccatggtggccgcgccaccaccgccgccgcagtttgccaagcacttcgctgctgggccgcccccgccgccccaagctggtgctgggcgccgcacgccgaccccgccctcgtctggatccggcgggaacgggtgcgaagaaaataaaaccatttgggtcggtgacctccagtactggatggatgaaaactacctacataactgcttcgggcccagcggcgaggtggttacaataaaagttatccgcaataggcaaacaggacagtcagaggggtatggatttgttgagttcttttctcatgcatcagcagagaaagctcttcagaattttactggtcatgtgatgccaaacactgaccggccatttaaattgaactgggcatcgtatagcatgggtgaaaagcgatctgaagtggcttctgatcactcgatatttgttggcgatctagctgctgatgtcactgatgaaatgctgctggagcttttctccagcaagtaccgctcggtgaaaggagctaaagttattattgatgcaaacacaggccgttccaggggctatggatttgtcaggtttggagacgacaacgacaaatctcatgccatgtctgaaatgaatggtgtatattgctctacgaggccaattcgtataggacctgcgactcccagaagatcttcaggtgattctggctcctcgactcctggtcattcagatggtgattcttctaacagaacggtatatgttggtgggcttgaccccaatgtcagtgaagatgaactgagaaaagcctttgccaaatatgatcttgcctctgtgaaaattcctctaggaaagcaatgtggctttgttcaatttgttagcagaactgatgctgaagaagcactacaaggattaaatggatcactcattggaaagcaggcagttcgcctttcatgggtccgcagcccatcgcataagcagtctaggggtgactccgtcaacaggaggaacaacatgtactatggcacaccattctacggcggatatggctatgcctccccggtgccacacccaaacatgtacgctgcagcgtatggcacgtacccgctatatggcaaccagcagctagtgagctagagagctcccctccgacgtgtcccctctgacgggaaacaaaggttttggtccggtgagcatagtagcgtcaggtgagaaggtgcctttataaggctgtcctaagaagtgggcgagatatgttgttgcatcgttatcgttatggtgcctgtaactgttgtgtgtgccgtgtgcgtccggaagaattggatggaatggaactcgtggcttgttgtagtacatcagagagtcatgttattctttcaagaaattttgacttggtaataaattaaactattgtttgtgcgtcaaaaaaaaaaaaaaaaaaaag

SEQ ID NO: 254 - protein, 420 aa, Zea mays
MQMAATTTESQAAVPPQHPHAHPHAPPQHAHPHHHMPQPRWVVIPYPPPPPMVAAPPPPPQFAKHFAAGPPPPPQAGAGRRTPTPPSSGSGGNGCEENKTIWVGDLQYWMDENYLHNCFGPSGEVVTIKVIRNRQTGQSEGYGFVEFFSHASAEKALQNFTGHVMPNTDRPFKLNWASYSMGEKRSEVASDHSIFVGDLAADVTDEMLLELFSSKYRSVKGAKVIIDANTGRSRGYGFVRFGDDNDKSHAMSEMNGVYCSTRPIRIGPATPRRSSGDSGSSTPGHSDGDSSNRTVYVGGLDPNVSEDELRKAFAKYDLASVKIPLGKQCGFVQFVSRTDAEEALQGLNGSLIGKQAVRLSWVRSPSHKQSRGDSVNRRNNMYYGTPFYGGYGYASPVPHPNMYAAAYGTYPLYGNQQLVS

SEQ ID NO: 255 - DNA, 1184 bp, Oryza sativa
gcacgaggttctacagtcatgctgctgctgagaaagtacttgaaggatttgctggtcatataatgccaaacactgaccaaccttttaggataaattgggcatcatttagcatgggggacagacgttcagatattgcttcagatcattccatatttgtaggcgaccttgcttctgatgtcaatgataccacattactagagactttctccaaaaggtactcctctgtcaaaggtgcgaaagttgttattgatgctaatactggtagatcaaagggctatggttttgtgagatttggagatgataacgagaagacacatgccatgactgagatgaatggtgtgtattgctctaccaggccaatgagaattggccctgcaactcccagaaaaacctcaggtacttctggacctactggttcagctgctcgatcagatggagatttgacaaacacaactgtatttgtcggtgggcttgatccaaatgttagtgaagatgaccttaggcaaacattttcgcaatacggtgaaatttcatcggtaaagatcccagttgggaaacagtgcggctttgtgcagtttgttcagaggaagaatgcggaagatgcattgcaaggactgaacggaagcaccattgggaaacagaccgtgcgtctttcgtggggacgcaatccagcaaacaagcagttgaggagtgacaatggcagtcagtggaacaacgggatgtactacgcagcctcgccgttttacagtggatacggctaccctgcaccgttccctgctgatccgggcatgtacgctgctgcttatggcgcctacccgttctacggaaaccaacaacaagtgagctaagaggtcacttgtgcttcacctcaaactggagctaggcacgcaagcattagcagtagctcttgctagaagaaaaaaagaacaaggtagacgacggtttcctaggtcagctagatgcagtcactggttatgtaaagtacattactacacgaactagctagcgccactaagccgccctattgactggccatggtctgctgaactcttcttccagaaaagaagttttgacctggagctgcaccttattgaagtagaacaataaacttttccaaaaaaaaaaaaaaaaaaaaaaaaaaaaaaaaaaaaaaaaaaaaaaaaaaaaaaaaaaaaaaaaaaaaa

SEQ ID NO: 256 - protein, 279 aa, Oryza sativa
FYSHAAAEKVLEGFAGHIMPNTDQPFRINWASFSMGDRRSDIASDHSIFVGDLASDVNDTTLLETFSKRYSSVKGAKVVIDANTGRSKGYGFVRFGDDNEKTHAMTEMNGVYCSTRPMRIGPATPRKTSGTSGPTGSAARSDGDLTNTTVFVGGLDPNVSEDDLRQTFSQYGEISSVKIPVGKQCGFVQFVQRKNAEDALQGLNGSTIGKQTVRLSWGRNPANKQLRSDNGSQWNNGMYYAASPFYSGYGYPAPFPADPGMYAAAYGAYPFYGNQQQVS

SEQ ID NO: 257 - DNA, 1644 bp, Oryza sativa
gcacgagtggtaccttctctagggttttgactcctaaaccgccgcccccgtcctcccgcgccgccatgatgcagccgccgccgccgccgcagtgggcaatggggccgccgcctcctccgcagtacttccaggctggccctccgccgccgccgccacagtacttccagggggcgcatccacccgctgccatgtggggccagcccccgccgccgcaggctgcccctccgccggcgccggctggtggcgcagcaggggacgaggtgaggaccctgtggatcggcgacctccagttctggatggaagagaactacctgtacaactgcttctcccaggccggcgagcttatctcagcaaagataattcggaacaagcaaactgggcaacctgagggttatggtttcattgaatttggcagccatgctatagccgaacaagttctgcaaggctataatggtcaaatgatgcctaatggtaatcaggttttcaaattaaattgggcgacaagtggtgctggcgagaagcgtggagatgatggctcagattatactatatttgttggggatctcgcctcggatgttacagatttaattcttcaagatacattcaaggcccattaccaatcagttaagggtgcaaaagttgtctttgacagaagtactggtcgttcaaaaggctatggatttgttaagtttggagatttggatgaacagacacgtgcaatgactgaaatgaatggacaatattgttctagcaggcctatgcgtattggaccagcatccaacaagaaaaatataggtggccaacaacaaccaagtgctacataccagaatacacaaggaacagattctgatagcgatccaaacaatactactgtatttgttggtggtcttgatccaagtgtgactgatgaggttctgaaacaagccttcagtccatatggagaacttgtctacgtcaaaatacctgtaggaaagcgttgtggatttgttcaatattccaatagggcttcagctgaggaggccataaggatgctaaatggaagccaattaggaggtcagagcataaggctttcatggggtcgtagccctggaaacaagcagcctcagcaagaccagaaccaatggaatgctggctattatggatatcccccccaaggatatgatccatatggttatgttcggccgcctcaagatcctgccatgtacgcttatgcagcatatcctggatacgggaattatcaacaaccagcgccacagcagccccctcaacagtaagaacaagtgttggtcaagtgccctatcacaacatatgatgaaatagttttggcaactttggtgtaattggcatgaaaattttttgaactgttgcttgtgctatctttgttgaacgtcgtgtgcacgcccagcctatgttgtaacatgacattttactgaggcctaggtgacactagaatgacagcttttagggagggagtattggagtgaacatttttcgcttgctcaaaaagttttgtcgccatgggtaccattagaagaggagttgagcaagaaataataagtttgtaacattagacatcggcgtacattttaatcgggcactttggtattattgcaaaaaaaaaaaaaaaaaaaaaaaaaaaaaaaa

SEQ ID NO: 258 - protein, 402 aa, Oryza sativa
MMQPPPPPQWAMGPPPPPQYFQAGPPPPPPQYFQGAHPPAAMWGQPPPPQAAPPPAPAGGAAGDEVRTLWIGDLQFWMEENYLYNCFSQAGELISAKIIRNKQTGQPEGYGFIEFGSHAIAEQVLQGYNGQMMPNGNQVFKLNWATSGAGEKRGDDGSDYTIFVGDLASDVTDLILQDTFKAHYQSVKGAKVVFDRSTGRSKGYGFVKFGDLDEQTRAMTEMNGQYCSSRPMRIGPASNKKNIGGQQQPSATYQNTQGTDSDSDPNNTTVFVGGLDPSVTDEVLKQAFSPYGELVYVKIPVGKRCGFVQYSNRASAEEAIRMLNGSQLGGQSIRLSWGRSPGNKQPQQDQNQWNAGYYGYPPQGYDPYGYVRPPQDPAMYAYAAYPGYGNYQQPAPQQPPQQ

SEQ ID NO: 259 - DNA, 1494 bp, Oryza sativa
  unsure (1429)
gcacgagtgtatcctcctctcgcgaccaccaaccagcggcggcggccgggggtggatccggcggagggaacggggacgagaaccggacgatttgggtcggggatctccagtactggatggacgagggctacctgcacaactgctttggccccagcggcgaggtggtcacaattaaagttattcgtaatagacattctggagtttctgagggttatggttttgttgagttcttttctcatgcatcagcagagaaagcactccagaatttttctggtcatgtaatgcctaataccgaccgagcttttaagttaaactgggcatcatatagcatgggagaaaagcgcgccgaacttgcttctgatcactcaatatttgttggtgatctggctgttgatgttacggatgaaatgttgatggatctttttgccaaaaaataccgatctgtgaaaggagctaaagttattattgatgcaaacaccggacgttctaggggctacggctttgttaggtttggagatgataacgacaaaactcatgcgatgactgaaatgaatggtgcatattgctctacccggccaattcgtataggacctgcaacacctagaagatcttcaggtgattctggctcctcgccaccaaggcagtcagatagtgactcaactaacaggacgatatatgttggcgggcttgatcccaacgctactgaagatgaactaaggaaagcatttgctaagtatggtgatcttgcctctgttaaaattcctgttggcaaacagtgtggttttgttcaatttgtcaacagacctgatgcagaagaagcactgcaagggttgaatggatcaacaattggaaagcaggcagtgcgtctttcctggggccgcagtccagcaagcaaacagtctaggggtgattccggccaccggcgcaatggcatgtactacggtacacctttctacggtggatatggctatgcgtcgccacttccacacccaaacatgtatgcagcagcatatggagcctacccttactacggtaaccagcagcttgtgagttgatgagaggcttctctcttgtttcctccaatggaaaacgaggttttggtccagtaagcatagtagcgtgtgatgagatatttatagatggccataaagaagttggtgagacagcaggtattacctgaaatggtacctgcagatttgtgtcagtgagtaccgagtagaacctaaaaagcttgtagacaaaataagagttgttcttattctttcaagaaattttgactcgctaaaaaaaaaaaaaaaaaaaaaaaaaaaaaaaaaaaaaaaaaaaaaaaaaaaaaaaaaaaaaaaaaaaaaaaaaaaaaaaaaaaaaaaaaaaaaaaaaaaaaaaaaaaaaaacaaaaaaaaaaaaaaaaaaaaaaaaggggggaaanggccgcaaaaaaaaaaaaaaaaaaaaaaacccccggggggggggggggaacaatttccccccaag

SEQ ID NO: 260 - protein, 350 aa, Oryza sativa
TSVSSSRDHQPAAAAGGGSGGGNGDENRTIWVGDLQYWMDEGYLHNCFGPSGEVVTIKVIRNRHSGVSEGYGFVEFFSHASAEKALQNFSGHVMPNTDRAFKLNWASYSMGEKRAELASDHSIFVGDLAVDVTDEMLMDLFAKKYRSVKGAKVIIDANTGRSRGYGFVRFGDDNDKTHAMTEMNGAYCSTRPIRIGPATPRRSSGDSGSSPPRQSDSDSTNRTIYVGGLDPNATEDELRKAFAKYGDLASVKIPVGKQCGFVQFVNRPDAEEALQGLNGSTIGKQAVRLSWGRSPASKQSRGDSGHRRNGMYYGTPFYGGYGYASPLPHPNMYAAAYGAYPYYGNQQLVS

SEQ ID NO: 261 - DNA, 1423 bp, Oryza sativa
ccgctccgggaggcgacgagatcaggtcgctgtggatcggggatctccagtactggatggatgagagctacctctccaacgcttttgcccccatgggacagcaggttacctctgtgaaagtcatccgcaacaagcagagtgggcactctgagggttatggttttattgaatttcagtctcacgctgctgcagaatatgctctggctaactttaatgggaggatgatgcttaatgttgaccaacttttcaagctaaactgggcttctagtggtgctggtgaaaggcgtgctgctgatgatggtcctgagcacacaatatttgttggtgatttagcttctgatgttacagactccatgttggaagaagcattcaaaaccagttatccttcagttagaggagccaaagttgtttttgacaaagtcactgggcgatccaagggatatggttttgtacgttttggagatgaaaatgagcaaacacgtgctatgactgagatgaatggagcgaccttgtctacaaggcaaatgaggcttgggccggcagctaacaagaagaatatgggtacccagcagacatattcaacaaatggttaccagagctcccaaggaaacagtttggagaatgatcccaataatacaacaatctttgtgggcgggttagattccaatgtaaatgaggaccatctaaagcaagtatttactccatatggggaaattggttatgtgaagattcctctaggcaagcgttgtggatttgtccaatttactagcaggtcatctgctgaagaagccatccgtgtgctgaatgggtctcagattggtgggcagcaagttcggctttcatggggccgtactcctcagaacaagcaggctccccagcaggatgccaaccagtggaatggcaactactatggataccaacagggctatgattcttcttactatggtgcacccaatgcacaggatcctagtgcgcaaaactactatggatattctggctatggcaattacgaacagcagcaggagcccccacagcagcagcagcaacccccacaacagcccccacagcagtgaccatggcgacgtgcaactttcagatctcgcagttggattatcagggtgtacattttgcgtgaactcgagctggcgcttccttaagttatttgtagatgtctttgtgtggatgaggtcgtgttctagctccgctaccacctgtcgttagacgactgatcgaacccttttgacagtagccagtgtttcgttttttgggcctccctgggtgtgatgatcatcaaatctgatgctctgagagttactgaggcgactaatgttatttatggatggtttgtttgggcttttgcatggaaatgaaaccatcacccccctgtgaggctgtgattcccgtcaaaaaaaaaaaaaaaaaa

SEQ ID NO: 262 - protein, 356 aa, Oryza sativa
APGGDEIRSLWIGDLQYWMDESYLSNAFAPMGQQVTSVKVIRNKQSGHSEGYGFIEFQSHAAAEYALANFNGRMMLNVDQLFKLNWASSGAGERRAADDGPEHTIFVGDLASDVTDSMLEEAFKTSYPSVRGAKVVFDKVTGRSKGYGFVRFGDENEQTRAMTEMNGATLSTRQMRLGPAANKKNMGTQQTYSTNGYQSSQGNSLENDPNNTTIFVGGLDSNVNEDHLKQVFTPYGEIGYVKIPLGKRCGFVQFTSRSSAEEAIRVLNGSQIGGQQVRLSWGRTPQNKQAPQQDANQWNGNYYGYQQGYDSSYYGAPNAQDPSAQNYYGYSGYGNYEQQQEPPQQQQQPPQQPPQQ

SEQ ID NO: 263 - DNA, 1604 bp, Oryza sativa
ccgaccttctcaccgccgcgcctccgcctccgcctccgcctcaagccgccgcccgccgccgccaggagcggcctctccatggcggcagcgccgtaccaccagccgaccagcctggaggaggtcaggacgctctggatcggcgacctccagtactgggccgacgagaactacctctacaactgcttcgcccacaccggcgagttacaatctgtaaaaataatacgtaacaagctaacaagccttccagaaggttatggattcatagagttcatttctcatgaagttgccgagaaagttctacagacttacaatggcacacaaatgcctggaactgagcatacattcagattgaactgggcctctttcagctctggtgagaggcgtcctgatgcaggacctgatcattcgatttttgtgggagacttggcgcctgatgtcacagattacttgctacaggagacattccgtgtgagctatccttctgtcaaaggggctaaggttgtcacggatccaaatactgggaggtccaaagggtatggatttgtaaagtttgcagatgaaaatgaaaagaatcgtgcaatgacagaaatgaatggtatgtattgctcaacaagacctatgcggataagtgctgcaatacctaaaaaaaccactggatctcagcttcagtatggagctgctaaagccatgtatccagcagcaggttatgcagttccgcaagtccaaccagttctaccagatagtgatccgacaaacaccactatatttataggtaacttggatcagaatgtgacagaagatgaactcaggcagatctgtgtccaatttggggagcttatatatgtaaaaattccagccaataaagcttgtggatttgtacaatatgcatctcgggcatcagctgaagaggcagtacaacgtcttcatggcacaacgatcggccaacaagtagtcaggctttcatggggcaggagtcctgcgagcaagcaggatcaatcagctgtctggagtcaacaagctgatcctaatcaatgggcaagtgcttattatggctatggatatgatgcatatggatatgcccaggacccatcatatgcatacaattcttatgcaggatatacccagtacccccagcaggttgagggagcgaccgatatggcatcagcagctggaagccatgccccaggaatggaaaaggaggaggtgtatgatccaatgaacttacctgatgttgacaagttgaatgcgtcgtacatcgctgttcatggtagagccatgcttgggcgatccctgtggttgagaacttcatcattgcctcagtcagcttgagcgcctatttatcactcctcgttgccttttttactgaagactgcaatgccagtagagccagttggtagtttgcaaaaacggagaaactgtgacaggctgactgacagcttaatgtatgttgatttgtcatcacatgtatgattagggaaccccttttgctgagcctcttctaagtgaacagattactgccaatgatgcggctactttatgatgccaagttactggatgaaaatcatcagaaaaaaaaattctgtctaaaaaaaaaaaaaaaaaaa

SEQ ID NO: 264 - protein, 416 aa, Oryza sativa
MAAAPYHQPTSLEEVRTLWIGDLQYWADENYLYNCFAHTGELQSVKIIRNKLTSLPEGYGFIEFISHEVAEKVLQTYNGTQMPGTEHTFRLNWASFSSGERRPDAGPDHSIFVGDLAPDVTDYLLQETFRVSYPSVKGAKVVTDPNTGRSKGYGFVKFADENEKNRAMTEMNGMYCSTRPMRISAAIPKKTTGSQLQYGAAKAMYPAAGYAVPQVQPVLPDSDPTNTTIFIGNLDQNVTEDELRQICVQFGELIYVKIPANKACGFVQYASRASAEEAVQRLHGTTIGQQVVRLSWGRSPASKQDQSAVWSQQADPNQWASAYYGYGYDAYGYAQDPSYAYNSYAGYTQYPQQVEGATDMASAAGSHAPGMEKEEVYDPMNLPDVDKLNASYIAVHGRAMLGRSLWLRTSSLPQSA

SEQ ID NO: 265 - DNA, 1249 bp, Oryza sativa
gcacgagattggatggacgagaactacctccacagctgtttcggacccagcggcgaggtagtgacgataaaagttatccgcaatagacaaactggacaatccgagggatatggttttgtagagttctactctcacggatcggcagagaaggctcttcagaattttactggtcatgtgatgcctaacactgatcgacctttcaagttaaactgggcttcatatagcatgggtgaaaagcgatctgaagttgcttctgactactcaattttcgttggtgatctagctgctgatgttactgatgaaatgttgatggagctttttgctaataagtaccgctctgtgaaaggagctaaagttattattgatgcaaacacaggccgttctaggggctatgggtttgttagatttggagatgacaatgacaaatcccatgcaatgactgaaatgaatggtgcgtattgctctactaggccaattcgtattggacctgcaactcccagaaggtcttcaggtgattctggctcctcaacacctgggcattcagatggcgattctactaacagaacggtatatgttggtgggctcgatccaaatgtcagcgaagatgagctgaggaaggcatttgccaaatatggtgatgttgcctctgtaaaaattcctctagggaagcaatgtggctttgttcaattcgtcagcagaactgatgcggaagaagcactgcaaggattgaatggatcagtcattggaaagcaggcagttcgcctttcatggggccgcagcccatcacataaacagtctagggctgattctggcagccgaagaaacaatatgtactatgggacgccattctacggtggatacggttatgcctcccccgtcccgcaccctaacatgtatgctgctgcatatggagcctaccctgtctatggcagtcagcagctagtgagctagagaagagagagagagagagagcttcattccattccctccaatggaaaacaaggttttggtccggtcagcatggtagcgccagatgtgaggttatagaacgtcctaaaagcgagtgaaacaggtaaaatgaatgtatggtatctgtagtgttgtctgtgttgcaagaagtataactcaaggcttgtagacacaagtgagtcgatggtattctttcaagaaattttgacttgctaataaattaaactattgtttgtgtgtcaaaaaaacaaaaaaaaaaaaaaaaaaaaaaaaaaaaaaa

SEQ ID NO: 266 - protein, 316 aa, Oryza sativa
ARDWMDENYLHSCFGPSGEVVTIKVIRNRQTGQSEGYGFVEFYSHGSAEKALQNFTGHVMPNTDRPFKLNWASYSMGEKRSEVASDYSIFVGDLAADVTDEMLMELFANKYRSVKGAKVIIDANTGRSRGYGFVRFGDDNDKSHAMTEMNGAYCSTRPIRIGPATPRRSSGDSGSSTPGHSDGDSTNRTVYVGGLDPNVSEDELRKAFAKYGDVASVKIPLGKQCGFVQFVSRTDAEEALQGLNGSVIGKQAVRLSWGRSPSHKQSRADSGSRRNNMYYGTPFYGGYGYASPVPHPNMYAAAYGAYPVYGSQQLVS

SEQ ID NO: 267 - DNA, 1572 bp, Glycine max
gcaccagaagagacagaaagaaggacactgttcacggttagggtttgagtctcaaccactctttctttaaagcacagtctcgcattcctccttgcctctttgttctctctttttctctctccttctttctttgtttctgtgtgttcgagattgaagaagatgatgcaggctggacccggcggcatggcccaacaagcgaaccaacaatacgcacagcaacagcaacaaccctacatgatgatgccgccgcagcctcagccccctcagatgtgggccacatcggcccagcctccgtcccagtcggtggctcctccgcaacccaccagcgccgatgaggtccgtaccctctggatcggtgatttgcagtactggatggacgaaaattatctctacacctgtttggcacacaccggcgaggtggcttcagttaaagtcattcggaacaaacaaactagtcaatcggagggatatgggtttattgagtttactagtcgtgctggtgctgagagagtccttcaaacatacaatggcaccattatgccaaatggcgggcagaacttcagattgaactgggcaactcttagtgcaggtgagaggcgtcacgatgatagcccagatcacaccatatttgttggagacctggctgccgatgttacggattatcttcttcaagagacatttcgggcacgatatccctcaattaagggggccaaagttgtaattgataggctaactggacggacaaagggttatggttttgttaggtttggagatgagagtgaacaggttagagctatgactgaaatgcaaggggttctttgttcaacaaggcccatgcgaattggaccagcctctaataaaaaccctagcactcagtctcagccaaaagcatcatatcagaatcctcaaggggcacagaacgagcatgatccaaataatacaactatttttgtcggcaatttggatcctaacgtcacggatgaccatttgagacaagtttttgggcattatggagagttagttcatgtgaagattccagctggcaagcgatgtggatttgtccaatttgcggaccggagctgtgcggaagaggcactgcgggttttgaatggcacacttctaggcggacaaaatgttaggctttcatgggggcgaagtccttcaaacaaacaggctcaaccagatgcaaaccagtggaatggtagtggtggtggatactacggatatgctcaggggggctatgaaaattatggttatgcccctgctggacaggaccccaatatgtatggcagttatcctgggtatgcgaattaccaacctccccagcaacagcagcaaataggatatagctaagaagttgggcaccaattttttccgttttcttctgtaatgctatgctattgctaagatactcgttttggttgcttctcttttattgtatcgtggagaacaaacttggctgaatacattctatgcgaataggatatagctaagaagtttcttatgacattctatgcgaattttattttgtatccattaaatattgcttgctgaaaaaaaaaaaaaaaaaaa

SEQ ID NO: 268 - protein, 397 aa, Glycine max
MMQAGPGGMAQQANQQYAQQQQQPYMMMPPQPQPPQMWATSAQPPSQSVAPPQPTSADEVRTLWIGDLQYWMDENYLYTCLAHTGEVASVKVIRNKQTSQSEGYGFIEFTSRAGAERVLQTYNGTIMPNGGQNFRLNWATLSAGERRHDDSPDHTIFVGDLAADVTDYLLQETFRARYPSIKGAKVVIDRLTGRTKGYGFVRFGDESEQVRAMTEMQGVLCSTRPMRIGPASNKNPSTQSQPKASYQNPQGAQNEHDPNNTTIFVGNLDPNVTDDHLRQVFGHYGELVHVKIPAGKRCGFVQFADRSCAEEALRVLNGTLLGGQNVRLSWGRSPSNKQAQPDANQWNGSGGGYYGYAQGGYENYGYAPAGQDPNMYGSYPGYANYQPPQQQQQIGYS

SEQ ID NO: 269 - DNA, 1757 bp, Glycine max
gcaccagccctttctcagtttctctctctagaaaaaccaaaacctggctcctttttttagctctttccttatttagccttcacacactccaaactgtgaaatccatttttagcaaagtaaaaaaaagtgagccagtgtgagagagagtggtcatcagtcatcaccgttgattgattaagatgcagcaatcaaacggctctgattcgacgactacgatggagcagagcgcgccgccgcctccgaggcaatcaccggcggtggcgaggccgcagcagtgggtgccgatgcagtaccctgcggcggcggcgatggtaatgccgcaccacatgttgccgcctcagcattatgcgccgccgccgtacgtgccttaccaccaccagtacgcggcgcagccccagcaccagcaccagaacggatccggcggtgagaacaaaaccatctggatcggcgatttgcatcattggatggacgaaaactatctccatcgctgtttcgcttccaccggcgagatttcctccatcaaggttattcgcaataagcaaactggcctatcagagggttatggatttgtggagttctattcacatgctacagctgagaaagttttgcaaaattatgctggaattttgatgcccaatgctgaacaaccattccgtctgaactgggcaacatttagcacaggagacaagggttcagataatgttcctgacctttctatttttgtaggagatttagctgcagatgttacagatagtttgttgcatgaaacttttgctagtgtatatccttctgttaaagctgcaaaagttgtttttgatgccaatactggccgttcaaagggctatggtttcgtcaggtttggagatgacaatgagagaacccaggccatgactcagatgaatggtgtttactgttctagcaggccaatgcgtattggtgctgcaactcctaggaaatcatctggccatcaacagggtgggctgtcaaatggcacagccaaccaatctgaagcagattctactaacacaactatatttgttggaggactggaccctaatgtttcagatgaagatctcaggcagccattctcccagtatggtgagatagtctctgttaagatacctgttggaaagggctgtggctttgtccaatttgcaaacagaaataatgctgaagaggcattgcagaagctaaatgggacaacgattggcaagcaaacggtccgtctttcttggggtcgtaatccagcaaataagcagtttagaatggatttcggcagcccttggactggggcatattacggggcccctatgtatgatggttatgggtatgcattgccccctcgtcatgatcccagcatatatgctgctgcttatggtgcttaccccctttatggaggccaccaacaacaagtaagctgaatgaagtgcagtgcaggagtagcattcacaacaagttagacagcatcaagcttgaatgtgcaaattaagtttctctgtttgtaacttgcttgatctgttgaattcttaagacaagaatccctcctaattgtggagtggagatgaattttgatagcctgaggtagctctgtagggattcaattagtcattttgtttaggcctgtaggagtcatgactaatgaggaccttaaacttattataggaataattgtcttaagtatgtcagcgtgtgtgcttgcttgctatttatttgtttccggcagttgacattgaaaaaaaaaaaaaaaaaaaaaaaaa

SEQ ID NO: 270 - protein, 413 aa, Glycine max
MQQSNGSDSTTTMEQSAPPPPRQSPAVARPQQWVPMQYPAAAAMVMPHHMLPPQHYAPPPYVPYHHQYAAQPQHQHQNGSGGENKTIWIGDLHHWMDENYLHRCFASTGEISSIKVIRNKQTGLSEGYGFVEFYSHATAEKVLQNYAGILMPNAEQPFRLNWATFSTGDKGSDNVPDLSIFVGDLAADVTDSLLHETFASVYPSVKAAKVVFDANTGRSKGYGFVRFGDDNERTQAMTQMNGVYCSSRPMRIGAATPRKSSGHQQGGLSNGTANQSEADSTNTTIFVGGLDPNVSDEDLRQPFSQYGEIVSVKIPVGKGCGFVQFANRNNAEEALQKLNGTTIGKQTVRLSWGRNPANKQFRMDFGSPWTGAYYGAPMYDGYGYALPPRHDPSIYAAAYGAYPLYGGHQQQVS

SEQ ID NO: 271 - DNA, 1722 bp, Glycine max
tttctctcttcgcctggtcttggcatctccgcagcaccaccacccaccaccctgcttagaccaggtcctctctctctctagagagaaagagaaaaaagaaaaaaaaaaaacaactaacattaagcttttaatagtaagacatggctcaacccagttccaacggggatctgaataataaccagcagcagggtcaggttcagcaacaacagcagcagggtcagtgggcggcggcggcgcagccgcatcagtatcagcagcaatggatggctatgcagtacccggccaccgccatggccatgatgcagcaacagatgttgatgtacccgcagcattatatgccctatgctcaccctcattacccgccgccgccgccgcctcctccctcctcccaccaccaccaccaccacaaacaggccgcggcctcctccgacgagatcaggaccgtctggctcggcgacctccaccattggatggacgagaactacctccacaactgctttgctcacaccggcgaggttgtttcggccaaggtcattcggaataagcaaactggtcagtccgagggatatggattcgtggagttctattcgcgagggacggctgagaaagtcttgcagaactataatggcacgatgatgcccaatacagatcaggcattccgtctgaattgggccacattcagtgccggggaaggacgttcctccgatgctacttcggatctctctatatttgttggggacttggccattgatgttaccgatgctatgctgcaggatacttttgctggccgatattcgtctattaagggagcaaaagttgtcattgattctaatactggccgctcaaaaggctatggttttgttaggtttggtgatgaaaacgagagaacgagggcaatgaccgaaatgaatggcgtttattgttctagtaggcccattcgaataggtgttgcaactcccaagaaaacttatggcttccaacaacaatattcttctcaagctgtggtattggctgggggacactcagctaatggtgctgtggcccaaggttcccattctgaaggggatataaacaacactactatatttgttggagggcttgattctgataccagtgatgaggatctcagacaaccatttttgcaatttggtgaggttgtctctgtgaaaattccagttggtaaagggtgtggatttgttcaatttgctgacagaaagaatgctgaggaagcaattcagggattgaatgggacagtaattgggaagcagacagtgcgtctttcttggggtcgcagtccaggaaataagcattggagatctgattccaatggaggccattatggtggtcatcagggttatggtggccatggatttgctgtgagacagaatcaggatatagccatgcaacctgctgctgcaattcaaggtgcttcctaacggggcttattagcagaactgtgtgttgaagtaggatggattttattgctctcccctaaactgtagtattatttttaaatttgtagctgggttaaggtatgccaggttcttaagattgtattaaaatgtctgaaattttggattgaacccgaccatataatatatgattcgggtatttttgttttttttttaaaccctcaaaacatattggtagcagacagctaagattatttaaatacttatctttacagtacaatgttactgcttgcaaaaaaaaaaaaaaaaa

SEQ ID NO: 272 - protein, 431 aa, Glycine max
MAQPSSNGDLNNNQQQGQVQQQQQQGQWAAAAQPHQYQQQWMAMQYPATAMAMMQQQMLMYPQHYMPYAHPHYPPPPPPPPSSHHHHHHKQAAASSDEIRTVWLGDLHHWMDENYLHNCFAHTGEVVSAKVIRNKQTGQSEGYGFVEFYSRGTAEKVLQNYNGTMMPNTDQAFRLNWATFSAGEGRSSDATSDLSIFVGDLAIDVTDAMLQDTFAGRYSSIKGAKVVIDSNTGRSKGYGFVRFGDENERTRAMTEMNGVYCSSRPIRIGVATPKKTYGFQQQYSSQAVVLAGGHSANGAVAQGSHSEGDINNTTIFVGGLDSDTSDEDLRQPFLQFGEVVSVKIPVGKGCGFVQFADRKNAEEAIQGLNGTVIGKQTVRLSWGRSPGNKHWRSDSNGGHYGGHQGYGGHGFAVRQNQDIAMQPAAAIQGAS

SEQ ID NO: 273 - DNA, 1583 bp, Glycine max
gcacgaggtcatcagtcatcaccgttgattgattaagatgcagcaatcaaacggctctgattcgtccacgacggagcagaaagcgccgccgccgaggcaatcaccggcggtggcgaggccgcagcaatggctgccgatgcagtaccctgcggcggcgatggtaatgccgcaccacatgttgccgcctcagcattacgcgccgccgccctacgtgcccttccaccaccaccaccaccatcaccagtacgcggcgccgcacgtgccgaaccaacatcagcagcagcagcagcatcaccaccatcagaacggatccggcggcgagaacaaaaccatctggatcggcgatttgcatcactggatggacgaaaactatctccatcgctgtttcgcttccaccggcgagatttcctccatcaaggttattcgcaataagcaaactggcttatcagagggttatggatttgtggagttctattcacatgctacagctgagaaagttttgcaaaattatgctggaattttgatgcccaatactgagcaaccattccgtctgaactgggcaacatttagcacaggagacaagggttcagataatgttcctgacctttctatttttgtaggagatttagctgcagatgttacagatagtttgttgcatgaaacttttgctagtgtatatccttctgttaaagctgcaaaagttgtttttgatgccaatactggccgttcaaagggctatggtttcgtcaggtttggagatgacaatcagagaacccaggccatgactcagatgaatggtgtttactgttctagcaggcctatgcgtattggagctgcaactccaaggaaatcatctggccatcaacaaggtgggcagtcaaatggcacagccaaccaatctgaagcagattctacaaacacaactatatttgttggaggactcgaccctaatgtttcagatgaagatctcaggcagccattctcccagtatggtgagatagtctctgttaagatacctgttggaaagggctgtggttttgtccaattcgcaaacagaaataatgctgaagaggccttgcagaagctaaacgggacatcgattggcaagcaaacagttcgtctttcttggggccgtaatccagcaaataagcagtttagaatggatttcggcaacccctggactggggcatattatggggcccctatgtatgatggctatgggtacgcattgacccctcgtcatgatcccagcatatatgctgctgcttatggggcttaccccctttatggaggccaccaacaacaagtaagctgaacgaagtgcagtacagtgctggagtaccattcacaacaagttagacagtatcgagcttgaatgtgcaaattaagtttctctgttttaacttgcttgatctgttgaattcttaagacaagaatccctcctaattgtggagcggagatgaattttgatagcctgaggtagctctgtaggggattcaattagtcatttgtttaggcctgtaggagtaatgactaatgaggaccttaaacttattataggaaaaaaaaaaaaaaaaaaaaaa

SEQ ID NO: 274 - protein, 425 aa, Glycine max
MQQSNGSDSSTTEQKAPPPRQSPAVARPQQWLPMQYPAAAMVMPHHMLPPQHYAPPPYVPFHHHHHHHQYAAPHVPNQHQQQQQHHHHQNGSGGENKTIWIGDLHHWMDENYLHRCFASTGEISSIKVIRNKQTGLSEGYGFVEFYSHATAEKVLQNYAGILMPNTEQPFRLNWATFSTGDKGSDNVPDLSIFVGDLAADVTDSLLHETFASVYPSVKAAKVVFDANTGRSKGYGFVRFGDDNQRTQAMTQMNGVYCSSRPMRIGAATPRKSSGHQQGGQSNGTANQSEADSTNTTIFVGGLDPNVSDEDLRQPFSQYGEIVSVKIPVGKGCGFVQFANRNNAEEALQKLNGTSIGKQTVRLSWGRNPANKQFRMDFGNPWTGAYYGAPMYDGYGYALTPRHDPSIYAAAYGAYPLYGGHQQQVS

SEQ ID NO: 275 - DNA, 1537 bp, Glycine max
cgagactcaatctctttctctctctttctttgccctctctttctctctctagaattctcagatttgcggggcgagatgatgcagcagccaggacccggcatggcacctcccaccatgggccagcagccgccgcaacagtaccagcagcctccgccgcagcagcagcaaccctacgtcatgatgccgccgcaggcccaggccccgcaggccatgtgggccccctccgcccagcctccgcctcagcagcagcccgccagcgccgacgaggtccgaaccctctggatcggggatctgcagtactggatggacgagaactatctctatacctgctttgctcacaccggcgaggttacatcggttaaagtaattcgaaacaagcaaactagtcaatctgaaggttatgggtttattgagtttaatagtcgtgctggagctgagagaattcttcaaacatataatggggcaataatgccaaatggggggcagagtttcaggttgaattgggcaacttttagtgctggtgagaggtcgcgccacgacgattctccagattacaccatatttgttggtgacttggctgcagatgttactgattatcttcttcaggagacatttagggctcgttataactcggtgaagggtgcaaaagttgtcattgataggctaactggccggaccaagggatatggctttgtaaggttttcagatgagagtgagcaagtgagggctatgactgagatgcaaggggttctttgctcaacaagacccatgaggattggacccgcctctaataaaacccccaccactcagtcccagcccaaagcttcatatcagaattctcaacctcaaggttcacagaatgagaatgatccaaataatacaactatttttgttggtaatttggatcctaatgtcactgatgatcatctgaggcaagttttcagccagtatggagaattagtgcatgtgaagattccagcaggcaagcgatgtgggtttgtccaattcgcagacaggagctgtgctgaagaggcacttcgggtgttgaatgggaccctgttgggtggtcaaaatgttcgtctttcatggggtcgcagtccttcaaacaaacaggctcaggcagatccaaaccagtggaatggtggtgctggttctggtggtggatactatgggtatgctgcacaaggttatgaaaattatgggtatgctcctgctgctggacaggatcccaacatgtatggcagttatccggggtatcctggttaccaaccacctcagcaacagcaacaaataggatatagttgagaagagaatgttccttttcttctgtaatcttttgtgatacttatcgagttgcgtgtctcttctcgtctcgtggaaaaccgactctgctactctttttcttttttccccttgtttgcttaataacattaaattttatcggagccgccttttgtatccataaattgcttgctgaatacttatttatgaaatgatctctattatgcattatgattttaaaaaaaaaaaaaaaaaa

SEQ ID NO: 276 - protein, 409 aa, Glycine max
MMQQPGPGMAPPTMGQQPPQQYQQPPPQQQQPYVMMPPQAQAPQAMWAPSAQPPPQQQPASADEVRTLWIGDLQYWMDENYLYTCFAHTGEVTSVKVIRNKQTSQSEGYGFIEFNSRAGAERILQTYNGAIMPNGGQSFRLNWATFSAGERSRHDDSPDYTIFVGDLAADVTDYLLQETFRARYNSVKGAKVVIDRLTGRTKGYGFVRFSDESEQVRAMTEMQGVLCSTRPMRIGPASNKTPTTQSQPKASYQNSQPQGSQNENDPNNTTIFVGNLDPNVTDDHLRQVFSQYGELVHVKIPAGKRCGFVQFADRSCAEEALRVLNGTLLGGQNVRLSWGRSPSNKQAQADPNQWNGGAGSGGGYYGYAAQGYENYGYAPAAGQDPNMYGSYPGYPGYQPPQQQQQIGYS

SEQ ID NO: 277 - DNA, 1674 bp, Glycine max
gcacgaggaaagaataaaataatgttaaagtatttatgtagtgaaaaagattgagtaggcagaggggatggcgagctaccagcaggcatcaacaatcgaggaagtgagaaccctatggattggggatttacaatactgggtggacgaagggtacctgagccactgcttcggccacacgggagaagtaatatccatcaaaatcatccgcaacaagctcacgggccagcccgagggctacggcttcgtcgagttcgtatcccacgccgcagccgagagggttctccagacctacaacggcacccaaatgcccgccactgaccagaccttcaggctcaactgggcctccttcggcattggtgagcgcaggcccgatgccgcccctgaacactccatcttcgtcggcgatctcgcccccgacgtaaccgattaccttctccaggaaacttttcgcgctcactacccttccgttcgcggcgccaaagttgtcaccgaccccaacaccgcccgctccaagggttacggcttcgttaagttttctgatgagaatgaacggaaccgcgccatgactgaaatgaacggcgtttattgctccaccaggcccatgcgtattagtgctgctacgcccaagaaaaccaccggtgcttatgctgcacccgccgcgcctgtgcccaaacctgtgtatccggttccggcctatacttcgcctgttgttcaagttcaaccacctgactatgatgtcaataatactaccatttttgttggtaatttggatcttaatgtgtcagaggaggagctgaagcaaaactctctgcaatttggggaaattgtttctgtcaaaattcagcctggcaagggatttggttttgttcaatttgggaccagagcatctgctgaagaagccattcagaagatgcagggaaagatgataggccaacaagtggtacggatttcttggggtaggactctaacagctagacaggacttacctggtggctggggaccacagatggatccaaatcaatggagtgcctactatgggtatggacagggttatgaagcctatgcttatgggcctgctcatgatccttcattgtatgcatatggtgcatatcctggctatgcacaatacccccaacaggttgaaggtgctcaagacctatcgggtatgtctgtgcctaccatggaacaaagggaggaattgtatgatccattggcaatgcccgatgttgataaattaaatgctgcatacctctcagtacatggaagtgccattttaggacggtcgctttggcaaaaaacctgttcgtcatccttacagcaagcttaagatctaattgtcctgcctggtcaattatgtgcattatatgacaatattctgcatagatttaaattcttgttaatacatacttgagttgatcccaatacattttttcttaaacacaactttgttggtgtaaagaatgtggaagcggatcctctccagcacctaccgtctccagctccctcctgcatcattgtcagccgttggatacaagtaaatgatgagtgttttaaaggttagaaagtcatacctagaaaaaaacattaagtaatgaataagttttttttttatcattaagtaatgaataaatttgatcctctcagtcggatgagaaaaaaaaaaaaaaaaaaaaa

SEQ ID NO: 278 - protein, 419 aa, Glycine max
MASYQQASTIEEVRTLWIGDLQYWVDEGYLSHCFGHTGEVISIKIIRNKLTGQPEGYGFVEFVSHAAAERVLQTYNGTQMPATDQTFRLNWASFGIGERRPDAAPEHSIFVGDLAPDVTDYLLQETFRAHYPSVRGAKVVTDPNTARSKGYGFVKFSDENERNRAMTEMNGVYCSTRPMRISAATPKKTTGAYAAPAAPVPKPVYPVPAYTSPVVQVQPPDYDVNNTTIFVGNLDLNVSEEELKQNSLQFGEIVSVKIQPGKGFGFVQFGTRASAEEAIQKMQGKMIGQQVVRISWGRTLTARQDLPGGWGPQMDPNQWSAYYGYGQGYEAYAYGPAHDPSLYAYGAYPGYAQYPQQVEGAQDLSGMSVPTMEQREELYDPLAMPDVDKLNAAYLSVHGSAILGRSLWQKTCSSSLQQA

SEQ ID NO: 279 - DNA, 1277 bp, Glycine max
tttgtgtcgcctggtcttggcatctccgcagcaccacccaccctggaccaggtcttcaacagagagaaagagaaggaagaacacacacacacacacacacacgttaaactaacattttttattagtaagaagacatggctcaacccagttccaacggggatctgaataataaccagcagggtcaggttcagcaacagcagcagcagtgggcggcggcgcagccgcatcagtatcagcagcaatggatggccatgcagtacccggccacagccatggccatgatgcagcagcagatgatgatgtacccgcagcattacatgccctacgctcacccccattatccgccgccgccgccgccgccgcctcctcagtcgtctcaccatcaccaccacaaacaggccgcagccgcggcggcggctgcggcctcctccgacgagatcaggaccgtctggctcggcgacctccaccattggatggacgagaactacctccacaactgctttgctcacaccggcgaggttgtgtcggccaaggtcattcgaaataagcaaactggtcagtctgagggatatggattcgtggagttctattcacgagcgacggctgagaaagtcttgcagaactataatggcacgatgatgcccaatacagatcaggcattccgtctgaattgggccacattcagtgcgggggaaaggcgttcttccgatgctacttctgatctctctatatttgtgggggacttggccattgatgttactgatgctatgctgcaagagacttttgctggccgatattcatctattaagggagcaaaagttgtcattgattctaataccggccgctcaaaaggctatggttttgttaggtttggtgatgaaaatgagagaacgagggcaatgactgaaatgaatggtgtttattgttctagtaggcccatgcgaataggtgttgcaactcccaagaaaacttatggctaccaacaacaatattcttctcaagctgtgctattggccggtggacacgcagctaatggtgctgtggcccaaggttcccattctgaaggggatttaaacaacaccactatatttgttggagggcttgattctgacaccagtgatgaggatctcagacaaccatttttgcaatttggtgaggttgtctctgtgaaaattccagtgggtaaagggtgtggatttgttcaatttgcagacagaaagaatgctgaggaagcaattcacgcattgaatgggacagtaattgggaagcagacagtg

SEQ ID NO: 280 - protein, 381 aa, Glycine max
MAQPSSNGDLNNNQQGQVQQQQQQWAAAQPHQYQQQWMAMQYPATAMAMMQQQMMMYPQHYMPYAHPHYPPPPPPPPPQSSHHHHHKQAAAAAAAAASSDEIRTVWLGDLHHWMDENYLHNCFAHTGEVVSAKVIRNKQTGQSEGYGFVEFYSRATAEKVLQNYNGTMMPNTDQAFRLNWATFSAGERRSSDATSDLSIFVGDLAIDVTDAMLQETFAGRYSSIKGAKVVIDSNTGRSKGYGFVRFGDENERTRAMTEMNGVYCSSRPMRIGVATPKKTYGYQQQYSSQAVLLAGGHAANGAVAQGSHSEGDLNNTTIFVGGLDSDTSDEDLRQPFLQFGEVVSVKIPVGKGCGFVQFADRKNAEEAIHALNGTVIGKQTV

SEQ ID NO: 281 - DNA, 1525 bp, Glycine max
gcacgagggaggctgaagcataatcagcgcggcggtgtaagatggtggcaacggcgatcgaggaagtgcgaaccctctggattggcgatttacagtactgggtcgacgagtcctacctctctcagtgcttcgcccacagcggcgaagtggtttccatcaaaatcatccgcaacaagctgacgggccagcccgagggctacggcttcgtcgagttcgtctcgcacgcctcggccgaagcctttctccgaaccttcaacggggcccaaatgcccggcacggaccagaccttcaggctcaattgggcctcgttcggggactccgggcccgaccactccatcttcgtcggcgatctcgcccccgacgtcaccgatttcatcctccaggagactttccgggcccattatccctccgttaaagggtccaaagtcgtcaccgaccccgccacgggccgctccaagggctatgggtttgttaagttcgccgatgaggcccagaggaaccgcgccatgactgaaatgaacggcgtttattgctccacgcgcccaatgcgtatcagcgcggctactcctaagaagaatgcttcttttcaacaccaatatgctccacctaaagcaatgtatcaatttcctgcatacactgctccagtgagtactgttgcgccggagaatgatgtgaataataccactgtttgtattggtaatttggatcttaatgtgacggaggaggagcttaagcaagcctttgtgcaatttggtgatattgtgttggtcaaaatttatgcgggcaaaggatatggttatgttcaatttggaactagagcgtctgctgaagatgccattcagaggatgcaagggaaggtaataggtcagcaagtgatccaaatttcttggggcagtaccttgacagctagacaggatgtacccggtggctggggtgcacagatggatccaagtcaatggagtgcttactacggatatggacagggttatgaatcatatgcttatggtgctactcatgatccctccttgtatgcttatggtgcatatgccggttatgcacaataccctcagaatgttgaaggtgctcaagacatgtcagcagtgtctatgcctatggaggaattgtatgaccccctggcaatgcctgatgtcgataaattaaatgctgcatatctttcaatacacggaagttctattttagggcggtccctttggcagagaacttcacaatctttacagcaagcctaggatctatatgtattgtcaggtcaattttaggcattaaggcttcaaaatatggctgtcttacaattttgcgtttgtttcaacatgagtggaagagcatgttaattagatcaatggtagtattttatgatgtaatactgaatatcaatgattttattttagtttaggatttgagttttaatagtaatcttgtattaaaatttagatatgatgtcataaggatattgtgtcgtaattttcagaatttgttgtaaaaaaaaaaaaaaaaaaaaaaaaaaaaa

SEQ ID NO: 282 - protein, 401 aa, Glycine max
MVATAIEEVRTLWIGDLQYWVDESYLSQCFAHSGEVVSIKIIRNKLTGQPEGYGFVEFVSHASAEAFLRTFNGAQMPGTDQTFRLNWASFGDSGPDHSIFVGDLAPDVTDFILQETFRAHYPSVKGSKVVTDPATGRSKGYGFVKFADEAQRNRAMTEMNGVYCSTRPMRISAATPKKNASFQHQYAPPKAMYQFPAYTAPVSTVAPENDVNNTTVCIGNLDLNVTEEELKQAFVQFGDIVLVKIYAGKGYGYVQFGTRASAEDAIQRMQGKVIGQQVIQISWGSTLTARQDVPGGWGAQMDPSQWSAYYGYGQGYESYAYGATHDPSLYAYGAYAGYAQYPQNVEGAQDMSAVSMPMEELYDPLAMPDVDKLNAAYLSIHGSSILGRSLWQRTSQSLQQA

SEQ ID NO: 283 - DNA, 541 bp, Triticum aestivum
tcgcatccgcatcagccgccgccggaaccggggaggcggcgatacgtcgcgatgcagccaacataccagccgccaatgaacggccagcacgcgcctcagccgaaggcctctggggctccgccgcctcctctgcagcaggcacccccgccgcagcagtactaccaggcgccgccgcagtactaccagcagggacccccgccggcgatgtggggccacccgcagcagcatatgcctccgcagtacgcgcctccgccgcagcagtacgcgcctcagcctcctcagcagtacgcgccgccgccgcagcattacgcgccgccgccgccgcagtacggagcgcagatggctggcgggccgcctcccggaggcgaggatatcaggtcgctgtggatcggagatctccagtactggatggatgagacctacctctacaacgcctttgcgcctgtggggccgcagcaggtcacctcagtgaaaattatccgcaacaaacatactgggcagcctgagggttatggttttattgaatttcactgaggtgacc

SEQ ID NO: 284 - protein, 176 aa, Triticum aestivum
SHPHQPPPEPGRRRYVAMQPTYQPPMNGQHAPQPKASGAPPPPLQQAPPPQQYYQAPPQYYQQGPPPAMWGHPQQHMPPQYAPPPQQYAPQPPQQYAPPPQHYAPPPPQYGAQMAGGPPPGGEDIRSLWIGDLQYWMDETYLYNAFAPVGPQQVTSVKIIRNKHTGQPEGYGFIEF

SEQ ID NO: 285 - DNA, 1160 bp, Triticum aestivum
gcacgagctagtctcgagctgctgcggaatatgctctggggacctttaatgggcagatgatgcctaatgttgaacaagtttttaagctaaactgggcttcttgtagtgctggtgacaagcggggtgacgatggttctgatcacacaatatttgttggtgatttggctgctgatgttactgacgccatgttggaagagatattcaaagccacctacccatcagttaaaggtgctaatgttgttactgacagggccactggtcgctccaaaggatatggttttgtacgctttggagatctaaatgagcagacacgtgctatgactgagatgaatggagtgccattgtctacaagacaaatgaggattgggcctgcagctaacaagaagaatataggtactcagcagacatattcaactaatgggtaccagagctctcaagtaaatgaggcggcgaatgatcccaacaatactacaatctttgtgggcgggttagattccaatatagatgagaactatctaaggcaagtttttactccatatggcgaagttggttatgtgaagattcctgtaggcaagcgttgtggatttgtccaatttaccagcagggcgtgcgctgagcaggccatcagtgcgctgaatgggtctcagattggtagttccaatgttcgcctttcatggggccgtagccaaaacaaacagcctccccagcaggatgcaaaccagggtaatggcaacagctactatggatatcaacagggtcctgatgcatactatggtgcacccaatgcgcaagatcctagcatgcaaaactatggatactctggttatggcagttacgagcagcaacagcagccatctcagcagcagcaacctccacagcagcagccaccacagcagcaacagcagcagcccccacagcagtgaccattgaggcgatggagcgcaatcagagattcagagctgcatgaactgaatgctaccgcgtcatgagttatcgtataggtgtccttgtttgtaagatgggtcgtatctagtagtactttgactgttgggcagtagctctagttctattcagtgcttctcttggttttaaattatcgaactatgtccatgactgagttaagcttttaatgttattttggatcaccaggttctaaaaaa

SEQ ID NO: 286 - protein, 288 aa, Triticum aestivum
MMPNVEQVFKLNWASCSAGDKRGDDGSDHTIFVGDLAADVTDAMLEEIFKATYPSVKGANVVTDRATGRSKGYGFVRFGDLNEQTRAMTEMNGVPLSTRQMRIGPAANKKNIGTQQTYSTNGYQSSQVNEAANDPNNTTIFVGGLDSNIDENYLRQVFTPYGEVGYVKIPVGKRCGFVQFTSRACAEQAISALNGSQIGSSNVRLSWGRSQNKQPPQQDANQGNGNSYYGYQQGPDAYYGAPNAQDPSMQNYGYSGYGSYEQQQQPSQQQQPPQQQPPQQQQQQPPQQ

SEQ ID NO: 287 - DNA, 1344 bp, Triticum aestivum
gcacgagagcaaactggacagcttcagggctatggctttgtcgagtttgcaagccatgcagcagctgagcgagttcttcagacattcaatggtcaaatgatgccaaatgttgagttggcatacagactgaactgggccagtgctggtgaaaagcgtgatgataccccggactatacaatctttgttggggatttggcagctgatgttacagactacatgttacaggagacattcagggtacattacccttcagtaaagggcgcaaaggttgtcactgacaagatgacaatgcgttcaaagggttatgggtttgtgaagtttggtgatcctacagagcaagctcgtgccatgactgaaatgaatggaatgccctgttcttccagacctatgcgcattggcccagcagcaaataggaagacaacaggggttcaggagagagtaccaattccaaatacaaatactcaaggagctcagtctgacaatgatcctaacaataccaccatatttgttggtggccttgaccccaatgtcactgaagatgccttgaaacaagtgtttgctccatatggggaagttgtccatgtcaagatccctgttgggaagagatgtggctttgttcagtatgctaacaggccttctgctgagcaagctctgcaattgctgcaagggaccttggttggtggtcagaatgtgaggctttcatggggacgaagcccttcaaacaaacaaactcagcctcaggaagccacccagtggggtgcaggtgctgctgctggtgctgctggtggttactatgctggatatggacaaggctacgaggcttatggacaagggtatgcacagcctcaagaccctaacatgtatggttatggagcctatgctggttatcccaactaccaacaaccagcagcggcaccgcagccaccgccaccacaacagtgagctctcctcgttgggtcgtccagacagatgagaacccctgtttgaaggcactgtcaaggctaatgttgtagcacctgtcgatagagagagacggttcctggactccggattttgattgccccatggcaaggtctattgttctgttattatgcactatgttatgatcagctgttgtccgtcccattgtggtgatcctttggatatgtacttggaaacttagctttgtttcgccgcatgtccttgtctactgttatttaccattgctatcttgtgctgttaaattatatactattgtaccgtttgcttccaaaaaaaaaaaaaaaaaaaaaaaaaaaaaaaaaaaaaaaaaaaaaaaaaaaaaaaaaaaaaaaaaaaaaaaaaaaaaaaaaaaaaaaaaaaaaa

SEQ ID NO: 288 - protein, 311 aa, Triticum aestivum
EQTGQLQGYGFVEFASHAAAERVLQTFNGQMMPNVELAYRLNWASAGEKRDDTPDYTIFVGDLAADVTDYMLQETFRVHYPSVKGAKVVTDKMTMRSKGYGFVKFGDPTEQARAMTEMNGMPCSSRPMRIGPAANRKTTGVQERVPIPNTNTQGAQSDNDPNNTTIFVGGLDPNVTEDALKQVFAPYGEVVHVKIPVGKRCGFVQYANRPSAEQALQLLQGTLVGGQNVRLSWGRSPSNKQTQPQEATQWGAGAAAGAAGGYYAGYGQGYEAYGQGYAQPQDPNMYGYGAYAGYPNYQQPAAAPQPPPPQQ

SEQ ID NO: 289 - DNA, 636 bp, Triticum aestivum
ctcgtgccgaattcggcacgagatccgcaatagacattccggagtttctgagggttatggttttgtagagttctgttcccatgcatcagcagagaaagcacttcagaattttgctggtcatgtaatgcctaatactgaccgagcttttaagttaaattgggcatcgtatagtgttggagaaaaacgctctgaacttgcttctgatcactcaatttttgttggtgatctagctgttgatgttactgatgacatgttgatggaactttttgctaacaaatatcgttctgtgaaaggagctaaagttattattgatgcaaacacgggccgttctaggggctatggatttgttaggtttggagatgatattgatagaactcatgctatgactgaaatgaatggtgtgtattgctccactcggccaattcgcattgcacctgcaactcctagaagaacttcagtttcaggtgattttggcacctctccaccaacacaatcagatggtgactcgactaacaggacagtatatgttggcgggcttgaccccaacgttagtgaagatgaactaaggaaagcatttgcgaaatatggtgatgttgcttctgtcaaaattcctgttgggaaacaatgcggttttgt

SEQ ID NO: 290 - protein, 214 aa, Triticum aestivum
SCRIRHEIRNRHSGVSEGYGFVEFCSHASAEKALQNFAGHVMPNTDRAFKLNWASYSVGEKRSELASDHSIFVGDLAVDVTDDMLMELFANKYRSVKGAKVIIDANTGRSRGYGFVRFGDDIDRTHAMTEMNGVYCSTRPIRIAPATPRRTSVSGDFGTSPPTQSDGDSTNRTVYVGGLDPNVSEDELRKAFAKYGDVASVKIPVGKQCGFVSC

SEQ ID NO: 291 - DNA, 1508 bp, Zea mays
ccacgcgtccgcgtccgtctccgctcctccgcaaccccttcccctcctccgccgaagcctctcctccggccgccgaaaccctagcctccgccgctgccgtcatggcaagcagcaacgtctcgaccgtttacatctctgtcattgatgacgtcatctccaaggtccgcgaggatttcatcacctacggagtcggtgacgccgtcctaaacgagctccaggctctctgggagatgaaaatgctacactgtggcgcgatctcggggaacatagaccgaaccaaggctgctgccgcgtccgtcggaggcaccaccggcacgacaccgcccgtgcacgacctgaacgtgccgtacgaggccacatctgaggagtacgccaccccgaccgctgacatgttgttcccgccgacaccattgcagaccccaatccagactcctctgccagggacagacacagcgatgtacaacatacccactggcccttccgattatgccccctcaccgatcagcgatgtcaggaatgggatggcaataaatggggcagacccaacagctggtcatccaagtccctacatgccaccaccttccccttggatgaatcagaggccgctgggtgttgatgtgaatgtcgcttatgtggaaggccgtgaagatcctgacaggggcgtgcagcctcagccactgactcaggattttttgatgatgtcttctgggaaacgcaagagggatgagtatcctggtcagctcccttctggttcttttgtaccacaacaagatggaagtgctgatcagatagtagaatttgttgtgtcaaaggaaaatgcgaatcaactttggagttccatcggcaataagcttgaaacaccaaccaagacaatcactccagttattccgcagcgtgatgggattcaagataactacaatgatcaatttttctttccaggagttccaaccgaagattataatacccctggagaatctgcggagtatcgagctcctacacctgctgttggaacaccaaaacaaagaaatgatgctggagatgatgataatgatgatgatgatgatgaacctcctcttaatgaagacgacgacgaggagttagatgaccttgagcaaggggaggatgaacctaacacacaacatcttgtacttgcacaatttgataaagtgtcaaggaccaagaatcgttggaagtgcaccttgaaggatggaatcatgcatttgaatggcagggatgtcctttttaacaaggcgacaggtgagtttgatttttgattttttggatgaagatgagctattttagaagcagctgtatggacatatctttgtcttgacataaggacagggaggtgacagtgttcttggtggggtcctggcagcatgactgcgtcgtgttttctttcctattgaatcttcgttccaccctcttgtttgtcaccgcaactgttatcgctgtaaagaagttactgcttgtgctgtgtagacaatttctgaaaaaaaaaaaaaaag

SEQ ID NO: 292 - protein, 390 aa, Zea mays
MASSNVSTVYISVIDDVISKVREDFITYGVGDAVLNELQALWEMKMLHCGAISGNIDRTKAAAASVGGTTGTTPPVHDLNVPYEATSEEYATPTADMLFPPTPLQTPIQTPLPGTDTAMYNIPTGPSDYAPSPISDVRNGMAINGADPTAGHPSPYMPPPSPWMNQRPLGVDVNVAYVEGREDPDRGVQPQPLTQDFLMMSSGKRKRDEYPGQLPSGSFVPQQDGSADQIVEFVVSKENANQLWSSIGNKLETPTKTITPVIPQRDGIQDNYNDQFFFPGVPTEDYNTPGESAEYRAPTPAVGTPKQRNDAGDDDNDDDDDEPPLNEDDDEELDDLEQGEDEPNTQHLVLAQFDKVSRTKNRWKCTLKDGIMHLNGRDVLFNKATGEFDF

SEQ ID NO: 293 - DNA, 1556 bp, Zea mays
ccacgcgtccgtccgcatccctcgccttcctccgcccaagcctctgttctcctccggctgccgaaaccctagccgcctccgccgtcatggcgagcagcaacgtctccaccgtctacatctccgtcatcgatgacgtcatctccaaggtccgcgaggatttcatcacctacggagtcggcgacgccgtcctaaacgagctccaggctctctgggagatgaaaatgctgcactgtggcgcgatctcggggaacatagagcgaaccaaggctgccgcggcttctgccggaggcacctccggcacgacaccgccagtgcacgacctcaacgtgccgtacgaggccacatccgaggagtacgccaccccgaccgctgacatgctgttcccgccgacaccattgcagaccccaatccagactcctttgccagggacagacacagggatgtacaacatacctactggcccttccgattatgccccatcaccgatcagcgatatcaggaacgggatgacgataaatggggcagacccaaaagctggccgtccaagtccttacatgccaccaccttccccttggatgaatcagaggccgctgggtgttgatgtgaatgtcgcttatgtggaaggtcgtgaagatcctgacaggggcgtgcagcctcagccactgactcaggactttttgacgatgtcttctggaaaacgcaagagggatgagtatcctggtcagctcccttctggttcttttgtaccacagcaagatggaagtgctgatcagatagtagaatttgttgtgtcaaaggaaaatgcaaaccaacattggagttccatcatcaacaagcttgaaacaccaaccaagacagtcactcctgttattccgcagtgtgatgggattcaagatgactacaatgatcaatttttctttccaggagttccaactgaagattataatacccctggagaatctgctgagtatcgagctcctacacctgctgttggaacaccaaaaccaagaaatgatgctggagatgataatgatgatgacgatgatgatgaagaacctcctcttaatgaagacgacgacgacgacgatgatttagatgaccttgaggaaggggaggatgaacctaacacacaacatcttgtacttgcacaatttgacaaagtgacgaggaccaagaatcgttggaagtgcactttgaaggatggaatcatgcatttgaatggtagggatgttctatttaacaaggcgacaggtgagtttgatttttgactttttggatgaagatgagctattttagaagcagctgtatggacatatcttgtcttagacataaggacggggaggtgacgaagtgttcttggtggggtgctggcagtatgactgcgtcgtgttttcctattgagactttgtttcaccctcttgtttgtcaccgcaattgttatcgctgtaaagaagttaccgcttgtgctgtggacattttctgagatgggtgtctcacatccgcagcgtaactaatgctagttatacatttttgtctctaaaaaaaaaaaaaaaaag

SEQ ID NO: 294 - protein, 393 aa, Zea mays
MASSNVSTVYISVIDDVISKVREDFITYGVGDAVLNELQALWEMKMLHCGAISGNIERTKAAAASAGGTSGTTPPVHDLNVPYEATSEEYATPTADMLFPPTPLQTPIQTPLPGTDTGMYNIPTGPSDYAPSPISDIRNGMTINGADPKAGRPSPYMPPPSPWMNQRPLGVDVNVAYVEGREDPDRGVQPQPLTQDFLTMSSGKRKRDEYPGQLPSGSFVPQQDGSADQIVEFVVSKENANQHWSSIINKLETPTKTVTPVIPQCDGIQDDYNDQFFFPGVPTEDYNTPGESAEYRAPTPAVGTPKPRNDAGDDNDDDDDDEEPPLNEDDDDDDDLDDLEEGEDEPNTQHLVLAQFDKVTRTKNRWKCTLKDGIMHLNGRDVLFNKATGEFDF

SEQ ID NO: 295 - DNA, 1612 bp, Oryza sativa
gcacgagtctctccttaattccccatctctctcgtccgcctccctcctcctcttccccccctcttcttccccaactcgccgccgtcctgcccgcctccaccctttcgcctcctcgttccccgcacccaaaccctaatcctagccgccgctgccgctgccgctgccgccgccatggccagcagcaacgtctccacggtctatatctccgtcatcgacgacgtcatctccaaggtccgcgacgacttcatctcgtacggcgtcggcgacgctgtcctcaacgagctccaggcgctctgggagatgaagatgctgcactgcggcgcaatctccgggaccatcgaccgctccaaggcggctcccgcgccgtccgcaggcacccccggcgctggaaccaccccgccggtacacgacctaaacgtgccctacgaggccacctcggaggagtacgccacccccacagcggacatgctgttccccccgacgccgctacaaaccccgatccagacccctcttccaggaacagatgcagggatgtacaacattcccactgggccttcagactatgccccttccccgatcagtgacgtgaggaatggcatggccatgaatggagctgatccaaagactggtcgcccgagtccctacatgcctccaccctctccctggatgactcagaggccgctgggcgttgatgtgaatgtcgcttatgtggagaaccgtgaggacccagataggaccggacagcctccgcaactaactaaggattttctaatgatgtcctctgggaaacgcaagagggatgaatatcctggtcagctcccttctggttcttttgtgccacaacaagatggaagtgcagatcagatagttgaatttgttgtctcaaaggacaacgcacaacaactttggagttccattgtgaacaagcaaggaacagcaacaaaagaatcttccacaaaggaaacaataattgctccaacgattcctcaacgggatgggatggatgactataatgatccattttacttccaaggagttccaactgaggattacaatacccctggagaatcgtcggaataccgagctcccacaccggctgttggaacaccaaaaccgagaaatgatgtaggcgatgatgatgagcctccgcttaatgaagatgacgatgatgatgatgagttagatgaccttgagcaaggggaggatgagcctaacacacagcaccttgtcctcgcacagtttgacaaagtgacaaggacaaagaaccgctggaaatgcactttgaaggatggaatcatgcatttaaatggccgagatgttctattcaacaaggctaccggcgaatttgatttttgaattttgtgacaaagaggagctattttagaagctgctgtatcgacatatctttgtctttgacataagagtggggaatgacaaaagcactggtggggggtgggtttgttcctgtggaggctttgctctacccagtgggtttgttaccgtaactgttatcgctgtaaaaaaaaatgctacagttgggactgttgtagacattttcctgagatggttatcttaaagttggcggaggattaaaaaaaaaaaaaaaaaaaaa

SEQ ID NO: 296 - protein, 394 aa, Oryza sativa
MASSNVSTVYISVIDDVISKVRDDFISYGVGDAVLNELQALWEMKMLHCGAISGTIDRSKAAPAPSAGTPGAGTTPPVHDLNVPYEATSEEYATPTADMLFPPTPLQTPIQTPLPGTDAGMYNIPTGPSDYAPSPISDVRNGMAMNGADPKTGRPSPYMPPPSPWMTQRPLGVDVNVAYVENREDPDRTGQPPQLTKDFLMMSSGKRKRDEYPGQLPSGSFVPQQDGSADQIVEFVVSKDNAQQLWSSIVNKQGTATKESSTKETIIAPTIPQRDGMDDYNDPFYFQGVPTEDYNTPGESSEYRAPTPAVGTPKPRNDVGDDDEPPLNEDDDDDDELDDLEQGEDEPNTQHLVLAQFDKVTRTKNRWKCTLKDGIMHLNGRDVLFNKATGEFDF

SEQ ID NO: 297 - DNA, 1673 bp, Glycine max
tttctctctcttcgccgttggtttcactcagctctcactctcatactaaaccctagcctcgcaattttccatgattcctctcgatctcttccactgaaatctctctcaaatcgatcgtataaggagaattatctgagacactcgcgatggcggcttccaccaccagccaggtctacatcgatgtaatcgaggatgtcatggtcaaggtccgagacgagttcgtcaacaacggtggtcctggagaggaagttctcaaggagcttcaagctatgtgggaatcgaagatgatgcaagctggcgctgtgctcgggtcccatagaaaggccagtgccgctaaggcaactcctggcggtccaattactccggttcatgatctcaacgtgccgtatgagggtaccgaggagtatgagactcctacagctgatatgctttttccccctacgccattgcaaactccaattcaaacccctttaccgggaactggggataactcaacgtataacattcctactggagcaaatgactacccctcttccggaaatgatacaggaggaaatgctgatggaaaaggagcaagacctgctccatatatgcaaccttcttctccttggatgaaccaaaggcctccacttgatgtcaatgttgcttatgtggaagggagggatgaggcagacaaaggaacttctaatcaacctctgacacaggacttcttcacgaggacgtcagggaagcgaaaacacaatgatttgacttctcaatataatgttggtggatatatacctcagcaagatggagctggggatgctgcacatggagtttttgaaattgaggtaagtggagggggcatctccattaattcacatcacactatttccaaagaaaaaatgtcagcagatttggagaggtcgacttctagaattcctcaacttgatggaccaattccatatgatgatgatgtgctctctactccaaatatatacaattatggagaagtgttcagtgaagactacaacatttctaatacaccagctcctcctgaagtaccagcaagcactcctgctctcttggctcagaatgaagtaggtaatgattttgatgatgatgatgatgatgaacctccattaaatgaagaggatgatgatgatttagatgacatggaacaaggagacgatcaaaatacacatcatcttgttttggcccagtttgataaggtggcacgtaccaagagcaggtggaaatgcacattaaaggatggcatcatgcacataaataataaggacattctcttcaataaggcgacaggagagtttgaattctgatttttgttggagctggtgctttcgtcaaacatgattcggaggtgtcattgagtgtttcatgatctttttttgattataatattattaggtgaaagattgatgaagagagaaatatttttaccctttggagactattttgatgttggcctcttgtcatagagaatgagcaatttttggcctttaactggtggttagagactcaggcattttctttaagcccgccatttgtcaagtatgtggttctttagttctgtatacttggacattttggtgaatttaagaatccttgtatgataatgataggcttggtaggcctcgcgtaacttttggacccttaaaaaaaaaaaaaaaaaa

SEQ ID NO: 298 - protein, 390 aa, Glycine max
MAASTTSQVYIDVIEDVMVKVRDEFVNNGGPGEEVLKELQAMWESKMMQAGAVLGSHRKASAAKATPGGPITPVHDLNVPYEGTEEYETPTADMLFPPTPLQTPIQTPLPGTGDNSTYNIPTGANDYPSSGNDTGGNADGKGARPAPYMQPSSPWMNQRPPLDVNVAYVEGRDEADKGTSNQPLTQDFFTRTSGKRKHNDLTSQYNVGGYIPQQDGAGDAAHGVFEIEVSGGGISINSHHTISKEKMSADLERSTSRIPQLDGPIPYDDDVLSTPNIYNYGEVFSEDYNISNTPAPPEVPASTPALLAQNEVGNDFDDDDDDEPPLNEEDDDDLDDMEQGDDQNTHHLVLAQFDKVARTKSRWKCTLKDGIMHINNKDILFNKATGEFEF

SEQ ID NO: 299 - DNA, 2558 bp, Glycine max
cttccctatccgataattgacatttcgccgccgaattttttgggaggaacaaatccacgatggcggcctcctccaccagccaggtctacatccaggtaatcgacgatgtcatgatcaaggtccgcgacgagttcgtcaacaacggtggtcccggcgatgaagttctcaaggagcttcaatctatatgggaatcgaagatgttgcaagctggtgccattgtcggccccatagaaaggtccggggcgcctaagccaacgcccggcggtccaattactcctgttcatgatcttaacatgccttatgaggggactgaggagtatgaaactcccacagcagaaatgcttttcccccctacgccattgcaaactcctcttcaaacccctttaccaggaactgtggataactcaatgtataacattcccactggacctagtgactacccgtctgctggaaatgaacctggtgaaaataatgagataaaaggtggaaggcctggtccatacatgcaacctcctccctggacgagccagaaccagaaccagagggctccacttgacgtcaatgttgcttatgtggaagggcgggatgctgcggaaagaggagcctctaatcaacctctgacacaggacttcttcatgtcctcggggaagcggaaacgtgatgaaattgcttctcaatataatgctggtggatatatacctcagcaagatggagctggagatgctgattctcaaatttttgaaattgaagtgtatggagggggcatctccattgatgcaggtcactctacttctaatggaaaaatgccagcacattcagacaggccagcttctcagattcctcaatttgatggaccaattccttacgatgatgatgtggtttctactccaaatatgtacaattatggagtgttcaatgaagactacaacattgcaaatacaccagcttcttctgatgtaccagcaagtacccctgctcctgttgctcaaaatgaggttgatgaagaagatgatgatgatgatgagcccctaaatgaaaatgatgatgatgatgatttggatgatttggatcagggagaggatcaaaatacacaccatcttgttttggcccagtttgacaaggtgacgcgtaccaagagtagatggaagtgcaccctaaaggatggtatcatgcatataaataataaggacattctcttcaataaggcaactggagaatttgaattctgattttgtcggggattggtcttgccatttttgtggcagtgctttggtgaattacaggtgccattgagtattttgtaatctttctttgattataattattaaattaaagctggaggaggaagagaaaagtccgtaatactttcgtcactgttatattgatgtgggcctgttgtacataaaggatgagcaaattttggcctttttacatggataggtactctgaggcatttcctgaagtttgccatttgtcaagttggatatgtatgtctattagctctgcatacttggacagtttaaactgcagtgactgtcgtggttagtttttagccgtcataaagaacaacgataatgtctagtgtgtttttcttggttccaacatgatctctgaactttagtccaaaaagtgaaagaaaacatgaaaatttcgggaatatgttttctacaacagcaacgttcgtcatttcttgtgtttttttggacaaaacttaaaacatggtttttaaggtcagatggcaattgtagtgttatcttggaaaccagtgccgacatttattgtacaggttactgtgttggagaacaatctaaagacatgaacctaatttttttgtcttgtgttttctagattaatagcttgtttccatttccttttttttggtcgatgaacggtacgaaaccctagaatcaatggatacagcatgttgactggtcgagaaaaggaactttcattgccaagtgaatttatgatgaaacatttaataatttgtttgtaatacaataaatgtcttttataaaaaaaatcgaagtcaactgtttcatttaaagttataaaatttaactgaaaacagaatggagttttggtaacaggtaagattctccctaatgaaatgtataaaaaaataataagaaagttgttttagtgatttatgtcgccatagctaaagggatcatagtgacaactgtgggtgagacgaaggtatgggagacgtattttacggcaacgatgaccaccgagaaatgaacgatgattgtatgtataaggaggatgtagtgatggagagcatcagaagccaacgggaaatcaaagacctcaagcgcagacaaaacaacaacaactgctgctacttctacttccttcgatgctttcactttctcacgcttctccctgctttcgtcaacttctgatgtaacctactatttgtgttatgttatcaattaactcttgaaagtttttattcccaatttagatcaaatactgtgttgcagtattcatttttattttctttggtctccaaaaaaaaaaaaaaaaaaaaaaaaaaaaaaaaaaaaaaaaaa

SEQ ID NO: 300 - protein, 389 aa, Glycine max
MAASSTSQVYIQVIDDVMIKVRDEFVNNGGPGDEVLKELQSIWESKMLQAGAIVGPIERSGAPKPTPGGPITPVHDLNMPYEGTEEYETPTAEMLFPPTPLQTPLQTPLPGTVDNSMYNIPTGPSDYPSAGNEPGENNEIKGGRPGPYMQPPPWTSQNQNQRAPLDVNVAYVEGRDAAERGASNQPLTQDFFMSSGKRKRDEIASQYNAGGYIPQQDGAGDADSQIFEIEVYGGGISIDAGHSTSNGKMPAHSDRPASQIPQFDGPIPYDDDVVSTPNMYNYGVFNEDYNIANTPASSDVPASTPAPVAQNEVDEEDDDDDEPLNENDDDDDLDDLDQGEDQNTHHLVLAQFDKVTRTKSRWKCTLKDGIMHINNKDILFNKATGEFEF

SEQ ID NO: 301 - DNA, 647 bp, Triticum aestivum
  unsure (390)
  unsure (408)
  unsure (441)
  unsure (499)
  unsure (514)
  unsure (531)
  unsure (545)
  unsure (548)
  unsure (576)
  unsure (583)
  unsure (587)
  unsure (591)
  unsure (598)
  unsure (605)..(606)
  unsure (629)
  unsure (636)
  unsure (639)
  unsure (644)
cccgtttcccctctctccgagctgcagcccgcctcgccgtcgttacctcccacgcaaaccctaaccctaggcaccgccgccgccatggccagcggcaacgtgtccaccgtctacatctccgtcatcgacgacgtggtcgccaaggttcgtgaggacttcattacctacggcgttggcgatgccgtcctcaacgagctccaggctctctgggaaatgaagatgctgcactgtggcgcaatctcagggaacatcgaccgcaacagggccccccccgcttccgctgggaggcgctcctggggccggcgcgactcaaccgttgcacgactcaaacgtgcctacgaaggcaactccgaggagtacgcaacccaaccgccgaatgtgttccacgangcgctgcaacccgttcanaacattcaaggattatcaggatttaaataccanggcgtcgatatccatcgcgttatgacatagaacggatggatgatggtcgatcaaaaanggcgtcagcctaatnaactcatgctgatatanaacacggggttatntanttgtacagaaactagacaaacggtgagnactaccntggnaggntttcganttttgannggagggaatccgcgcattcgtantttacanggngaaanttt

SEQ ID NO: 302 - protein, 94 aa, Triticum aestivum
MASGNVSTVYISVIDDVVAKVREDFITYGVGDAVLNELQALWEMKMLHCGAISGNIDRNRAPPASAGRRSWGRRDSTVARLKRAYEGNSEEYAT

SEQ ID NO: 303 - DNA, 531 bp, Zea mays
ataagaagccagatttcgaattccctcctcctccgcctctcccgcagtccctcccccgtcgcgatcgctctgtgctccgcctccgtccgtcaaggcctgctcttgcgccgttcctcctcgcccaatccgccaggggatggccacattcgagctctaccggaggtccaccattggcacctgcctcaccgagacgctggacgagctcgtctccagcggggccgtcagcccggagctcgccatccaggtccttgtgcagttcgacaagtccatgactgaggcgctggagatgcaggtcaagagcaaggtcagcgtcaagggccacctgcacacctacaggttctgcgacaatgtctggaccttcattctaacagatgcaaccttcaagagcgaggagattcaagaaacactgggaagggtgaagatcgtggcctgcgattccaagttgctgcagcctcagcatccataaaacaagagtcgcctgctccatacatgttcactggcgccacccaaaccttcctagttcatgtgaat

SEQ ID NO: 304 - protein, 109 aa, Zea mays
MATFELYRRSTIGTCLTETLDELVSSGAVSPELAIQVLVQFDKSMTEALEMQVKSKVSVKGHLHTYRFCDNVWTFILTDATFKSEEIQETLGRVKIVACDSKLLQPQHP

SEQ ID NO: 305 - DNA, 570 bp, Zea mays
  unsure (438)
  unsure (456)
  unsure (495)
  unsure (511)
  unsure (515)
  unsure (554)
  unsure (559)
gtgacgacgaccgcgcgagcgccgccgactccctactgcatcaggtgcctcggccttcgtcgtgctctccgccggcaacgagtatagacgggcgcgcatggccaccttcgagctgtaccggaggtccaccatcggcatgtgcctcaccgagacgctcgacgagatggtctccaacggcaccctcagcccggagctcgctatccaggtcctcgtccagttcgacaagtccatgacggatgctctggagaaccaagtgaagagcaaggttactgtcaagggtcacctgcacacctacaggttctgtgacaatgtgtggaccttcatcttgacagacgcaagcttcaagaacgaggaggccacggagcaggtgggcaaggtgaagattgtggcatgtgattccaaattgctcggacaatagcctgtgtaccctcgagtcangaagaactttaagtcggnaagcgggtcttctgcggtcactgtaaccctagctacgcnagcgggtttctcgtanctgncaccctagctacgccgaaggatttattgctctctacgtngtgtnctcttttccct

SEQ ID NO: 306 - protein, 106 aa, Zea mays
MATFELYRRSTIGMCLTETLDEMVSNGTLSPELAIQVLVQFDKSMTDALENQVKSKVTVKGHLHTYRFCDNVWTFILTDASFKNEEATEQVGKVKIVACDSKLLGQ

SEQ ID NO: 307 - DNA, 807 bp, Oryza sativa
gcacgagagatttcgaattcctctctgcggctgcgctttgctcctcccctcaatcctcctctccgctctcgctctcagtctcagatcaggagggaggggatcgatattcgatcatcgatggccaccttcgagctgtaccggaggtccaccatcggtatgtgcctcaccgacacgctggacgacatggtctccagtggggcgctcagccccgagctcgccatccaagtcctcgtgcagtttgacaagtccatgactagcgctttggagcatcaggtgaagagcaaggttactgtcaagggccatctgcacacctacaggttctgcgacaatgtgtggactttcatcctaacagatgcaattttcaagaacgaagagattacagagacaataaacaaggtgaagatcgtggcctgcgattccaaattgctggagactaaagaagagtaatttgcggaagagcccatcctgcttctcttgatgctgcagacctggcgcacctgaaatataatcttgcatctgttttcctggctcgtatcatgaatctgaacagtttccatggtaggagtactagagtatcatgttcatagtttctgtctgccatccgcatcactcatggatcgatttctctcttctctgttgagtgatggaccgatttctctcctctgttgataatgaagagtgtgatgtgtgacatgagtgtgctctgtacctaatcatgctctcgccgaaggcagacctaacatttgaattctaaatctttgaacaggatgttcaaaaaaaaaaaaaaaaaaaaaaaaaaaaacggca

SEQ ID NO: 308 - protein, 109 aa, Oryza sativa
MATFELYRRSTIGMCLTDTLDDMVSSGALSPELAIQVLVQFDKSMTSALEHQVKSKVTVKGHLHTYRFCDNVWTFILTDAIFKNEEITETINKVKIVACDSKLLETKEE

SEQ ID NO: 309 - DNA, 852 bp, Oryza sativa
agaaatctggcgtctcgtcgtctcctccgctcctcctctccttgcgccaacaagccgactcgcgatctccatcgggcaagaagagcagagcagagcaggggaggggatcctgcagtttaggcgcacgcatcgcccatggccaccttcgagctctaccggaggtccaccattggcatgtgcctcactgagacgctcgacgagatggtctccagcggcaccctcagcccggagctcgccattcaagttcttgtccagtttgataagtctatgacggaagccttggagaaccaagtcaagagcaaggtttctatcaagggccacctgcacacttacaggttctgtgacaatgtatggacattcatcttgactgaagcatcattcaagaacgaggagactacagaacaagttggcaaggtgaagattgtggcctgtgattccaaactactcagccaataaattgataactgcgaggtcagggtttgcctggtatttgttagtctcttctgctagacctggctccgcctgaagtgtactgtaccaccacattgtttgtttcataatcaatgtgtgtcaatacaatcgtatgtgctaccagagtatatcacagcagcaactgttttaatttgtatgcttatgtaattgttatgctactgctgtgttgataatgtgatataaatgactaaacgatgagtagtagaaattgtgcggagtcaccctcccccttcctcatttctgaaccctttggttctgtgtgactctttgtatgtaacatgaacaaatacctcctttcccgtcttttttttggatcctatgttaatggtacctttacattaaaaaaaaaaaaaaaaaaaa

SEQ ID NO: 310 - protein, 106 aa, Oryza sativa
MATFELYRRSTIGMCLTETLDEMVSSGTLSPELAIQVLVQFDKSMTEALENQVKSKVSIKGHLHTYRFCDNVWTFILTEASFKNEETTEQVGKVKIVACDSKLLSQ

SEQ ID NO: 311 - DNA, 547 bp, Glycine max
  unsure (454)
  unsure (473)
  unsure (493)
  unsure (497)
  unsure (521)
  unsure (524)
  unsure (532)..(533)
  unsure (546)
atttctccaacgctatcgaaccaaacccaaacgttaactcagaagaagaccagcagaagaagaagaagaagaaacaaaaccgaaccactttcaactctccaacgtcgccacacgattcatcgcgtttcgcaggctgcaatggcgacgttcgaactgtaccgcagtcgaacgatcggaatgtgcctgacggagacgctggacgagatggttcagaacggcactctcagccccgagctcgcgattcaggttctggtccagttcgataagtccatgactgaggctctggaaacacaagttaagagcaaggtctccatcaagggacatctccatacatatagattttgcgacaatgtttggaccttcatcttgcaagatgctttgttcaagaacgaagacagccaaaagaatgttggacgggttaaaatagtggcgtgtgatcgaagtgctaaacaanatggcccaatctgcacctntaacaggagattgtgaactntggncaatgaaatgtggcagccatagtncanggctaaannatgcggactgacnc

SEQ ID NO: 312 - protein, 100 aa, Glycine max
MATFELYRSRTIGMCLTETLDEMVQNGTLSPELAIQVLVQFDKSMTEALETQVKSKVSIKGHLHTYRFCDNVWTFILQDALFKNEDSQKNVGRVKIVACD

SEQ ID NO: 313 - DNA, 729 bp, Glycine max
gcacgagcaaatttctccaacgctatcgagccaaacccaaacgttaactcagacgaagcaccaacagaagaagaagaaacaaaaccgaacctctctaaactctccaacgtcgccacccgattcatcgcatttcgcaggctgcaatggcgacgttcgaactgtaccgcaggtcgacgattggaatgtgcctgacggagacgctggacgagatggttcagaacggcactctaagccccgagctcgcgattcaggttctggtccagttcgataagtccatgactgaggctctggaaacgcaagttaagagtaaggtctccatcaagggacatctccatacatatagattttgtgacaatgtttggaccttcatcttacaagatgctttgttcaagagcgaagacagccaagagattgttggacgggttaaaatagtggcgtgtgactcgaagttgctcacacaataatgtgcctaatttctgccattgtcgacaaggacaaattgttgtcatctgctggtactatgggaatggtggccagaccatagttaaaatggtcttaaattcttgcaggaactagcaactattgtatgttattattatagatttaaaagccatcagtcttcatatcattaggtaattaatgctacaatgagaataccgcttggaaattgaatgaatctactcccttcttttaaaaaaaaaaaaaaaaaaaaaaaaaaaaaaaaaaaaa

SEQ ID NO: 314 - protein, 106 aa, Glycine max
MATFELYRRSTIGMCLTETLDEMVQNGTLSPELAIQVLVQFDKSMTEALETQVKSKVSIKGHLHTYRFCDNVWTFILQDALFKSEDSQEIVGRVKIVACDSKLLTQ

SEQ ID NO: 315 - DNA, 779 bp, Triticum aestivum
gcacgagcccactcctctcccccgatccgaaccctctcctcgccgcgctccgccccgcagcgccccggatctcgccgccaggaccgccgtcgacccgcagccgccgcaggcaaggcgatatggccaccttcgagctgtacaggcggtccaccatcggcatgtgcctcaccgagacgctcgacgagatggtctccagcggcaccctcagccccgagctcgccatccaagtgctagtccagttcgataagtctatgacggaggcactggaaaaccaagtgaagagcaaggttactgtcaagggccatctgcacacctacaggttctgcgacaacgtgtggacattcatattaaccgacgcgcagttcaagaatgaggagacgaccgagcaggtgggcaaggtgaagatcgtggcctgcgactccaagctactcagccaataagcagctctcgcgcgagctgccgactcccggaggcgggggtgggctcgttcgatcgatccccgcctccgctagagaagaacaccaccaccatcaccaccgccacatccccccctcctcataatccatgggtacctgtagaagaaggatctcatgcgatgcgatcctagagcagagcagagcagagcgtcgcatcgcggccacataacttttctccggtccgtgccgtgtactgttgtttccggaacttttggtataactggcgactggaatgagcaagtagcaaacaaaaactttgcttggaaaatctgtgtgacatttagtaaaaaaaaaaaaaaaaaa

SEQ ID NO: 316 - protein, 106 aa, Triticum aestivum
MATFELYRRSTIGMCLTETLDEMVSSGTLSPELAIQVLVQFDKSMTDALETQVKSKVTVKGHLHTYRFCDNVWTFILTDAQFKNEETTEQVGKVKIVACDSKLLSQ

SEQ ID NO: 317 - DNA, 1621 bp, Hordeum vulgare
gcacgagggaatactatcctcatggttatcatggcgttgacaaagaggggagacctgtttatatcgaaaggcttggaaaggttgaccctaacaagcttatgaatgtaacaactatggacagatatgtaaggtaccatgtgaaggaattcgagaggagcttcttgatcaaatttccagcatgctctcttgcggctaaaagacacatcaattcgagcacaactattctggatgttcagggtgtgggtttgaaaaatttcagcaaaactgcacgtgaattaattatgcgactgcagaaagttgacaacgataactaccctgagactttacaccaaatgtttatagtcaatgctggccctggctttcggatgctatggagcactgtgaaatctttcctcgacccaaaaaccacttccaagatacatgtacttgggaacaagtgtcagagtaaactgcttgaaataattgatgctagtgaattgccagaatttcttggtggcaattgtacctgtcccgaatatggagggtgcctcaaagctgaaaagggcccatggaaggacgcgaacatactgaagaaagtccttaatggtgaggcccagtgtgctcggcagattgtaactgtttccaatgggatggaaactattatttcttatgccaagtctaagcaccaaacggtacgtggaagtgatacatcaactgcggagtctggatctgaagctgaagatgtaacttcccccaaggctctaagaagttacatctcccatcctaagttgaccccagttcgtgaagaggtcaagatgatcagggccactagcttttctacccgcatgcctgaatatgatattcctgttgttgacaaagcagtggatgcaacatggaagagagaactgccccggaaggcacccttcccgtccaaagactcttcttctttggctgccaccacaaaggcacccaacaggtcgctggatcaggttattccagctctgatggcttttgtgattgctattgtaacgctgctccggtcagttaagatgttgccacaaagagattgccacataaaaatgagtcagatgaacaaagttcttcaatatatcaagactgcattcccaaggaggagttccgccccccgtcgccaggtcctgggtttgctgaatctgacctgttctcgttagtcttgcaaaggctggcagagcttgaagccaaggttcacgcgcttgaagaaaaaccttccgaaatgccttgcgagaaagaagagttgcttaatgctgctgtccgccgtgtggatgcactggaagctgagctcattgtaacaaagaaggctctgcacgaggctcttatcaggcaagaggaactacttgcttacgttgacaggaagacaattgccaaggcccagaaaaagaagaagaagccaatgtcttgctactaggacaaggagagagactcccttggttcagttttcctttttctgagatgccggagatggcgtttgagatgatgtaaacggttggttgatccgttcgttttcctgacaaatgtgaaaaagacatacatgggtttgtaaatggacagaaaatcctgacataaataaatgtgtttttgggccgaaaaaaaaaaaaaaaaaaaa

SEQ ID NO: 318 - protein, 473 aa, Hordeum vulgare
TREYYPHGYHGVDKEGRPVYIERLGKVDPNKLMNVTTMDRYVRYHVKEFERSFLIKFPACSLAAKRHINSSTTILDVQGVGLKNFSKTARELIMRLQKVDNDNYPETLHQMFIVNAGPGFRMLWSTVKSFLDPKTTSKIHVLGNKCQSKLLEIIDASELPEFLGGNCTCPEYGGCLKAEKGPWKDANILKKVLNGEAQCARQIVTVSNGMETIISYAKSKHQTVRGSDTSTAESGSEAEDVTSPKALRSYISHPKLTPVREEVKMIRATSFSTRMPEYDIPVVDKAVDATWKRELPRKAPFPSKDSSSLAATTKAPNRSLDQVIPALMAFVIAIVTLLRSVKDVATKRLPHKNESDEQSSSIYQDCIPKEEFRPPSPGPGFAESDLFSLVLQRLAELEAKVHALEEKPSEMPCEKEELLNAAVRRVDALEAELIVTKKALHEALIRQEELLAYVDRKTIAKAQKKKKKPMSCY

SEQ ID NO: 319 - DNA, 2244 bp, Zea mays
  unsure (6)
  unsure (383)
  unsure (638)
  unsure (650)
  unsure (659)
  unsure (674)
  unsure (677)
  unsure (681)
  unsure (683)
gccganttccaaattgaaacagttgcaggcgattctgagctcgggttttgttccggggacggattcctgtgccggcggacgggatgtcaggccctctcgaccgatttgctaggccatgctttgaagggtttgtacataacgatgaaaggaaagagagcagatctgatgcagacaactcagaaggagataagaagactaagattgggtctttcaagaaaaaagcaattaatgcggggaacaaattcaggcattccttgagaaggagaagcaaaaaaaagaccgaaaggggggattccatcaaggacataagggacgttaaagagcttcaagatgttgagacattccgacaatgcttaattgatgaggatttgctgccaccacancacgattattatcacatgatgttaaggttcctaaaagcacggaaatttgaagttgagaaagctaagagtatgtggtcagacatgatcaattggaggaaggaattcggagtcgacaaaatagaggaatttgactacaccgagttagatgaagtgacagagtattacccacaattttatcatggagtagataaagagggaagacctgtctacatagaattagtaggaaaagttgatgcaaacaagctaatacaagtnacaaccctagancggtatgtnaaataccatgtcaangantttnanaagtgcttccagatgaaatttccagcttgcaccattgctgctaaaaaccacatagattcgtccactactattttggatgtgcaaggcgtgggtttcaagaacttctcgaaatctgccagagaattaatcacacgattacagaagatcgacagtgataactacccagagacactgtgccggatgtatataattaatgctggccaaggcttcaagatgttatggagcacaataaaatcattcctcgatccaaaaactgcttccaagatccatgttcttgggaataagtatcaacataagttgctcgaaataattgacgagtgtgaactgccagaatttcttggtggcaaatgcaattgtattgaaggttgccaaagatctgacaaaggtccttggaaggatcccaacataataaagagagtcctcaatgacgaggcaaactacggcagacaaattgtgaccatatccagcattgatggaaaaataatacgttatgctaggccagatcacccaactagaaaagggagtgatgcatctgccgagtctggatctgaagtggaagatgtaacatctcctactgcatcaaggaacctgattacacatcctattttgacccctgttcacgaagagtcaaaattgtcgccacatggttccacatttgttgctcatgcttctattgaagaaaacattcctgttgtagacaaggttgtggatgatggatggggtactcccagaggtagtctccaagcttcttcaggttcgttgccctcgagaaacacgcacggcacattcgaaggactgagagttcaagctgtcgcatggctgacgttcttgatcacggcccttttcgccacgctctgttccgtcccgagcaagatggccagaaggatctccagccagtctagcaagcacgacgactaccgcggcgagtatcctcaagaggaggaggagcacaaggaggagttccggcctccgtctcctgccccgtcctacacggagaaggacgtgctctcgtcgatgctgagacggctcggtgagctggagggcagggtgcaggtgctcgagacgaagccgtccgagatgccgtttgagaaggaggagctgctcaacgcagccgtccgccgcgtggacgcgctggaagccgagctgatctccacgaagaaggccctctacgatgctctgatgcgacaggatgagctgctcgcgtacattgacaggcaggagctgatcaagttccgtaaaaagaagttctgcttctaagatctgaccatggagcagctggtcatgtccggagccgttcgtgtatattgttggatcgcggctagtacggtgaatgatgtaatgtgtccatctgtacaagtgtgtaacggaacggtgtaagtatagtaggaaaacaatgtgttagctgtgcggtagcacttgtgtgctagcctaaattgtaatcttgcaagtcggtgcatagctgattgcgcaccaatacgtagttatgaatggaatcgcactcgtgttcgtataaaataaaataaattagcagcgccaaatgtttaaaaaaaaaaaaaaaaaa

SEQ ID NO: 320 - protein, 618 aa, Zea mays
  UNSURE (189)
  UNSURE (200)
MSGPLDRFARPCFEGFVHNDERKESRSDADNSEGDKKTKIGSFKKKAINAGNKFRHSLRRRSKKKTERGDSIKDIRDVKELQDVETFRQCLIDEDLLPPQHDYYHMMLRFLKARKFEVEKAKSMWSDMINWRKEFGVDKIEEFDYTELDEVTEYYPQFYHGVDKEGRPVYIELVGKVDANKLIQVTTLXRYVKYHVKEFXKCFQMKFPACTIAAKNHIDSSTTILDVQGVGFKNFSKSARELITRLQKIDSDNYPETLCRMYIINAGQGFKMLWSTIKSFLDPKTASKIHVLGNKYQHKLLEIIDECELPEFLGGKCNCIEGCQRSDKGPWKDPNIIKRVLNDEANYGRQIVTISSIDGKIIRYARPDHPTRKGSDASAESGSEVEDVTSPTASRNLITHPILTPVHEESKLSPHGSTFVAHASIEENIPVVDKVVDDGWGTPRGSLQASSGSLPSRNTHGTFEGLRVQAVAWLTFLITALFATLCSVPSKMARRISSQSSKHDDYRGEYPQEEEEHKEEFRPPSPAPSYTEKDVLSSMLRRLGELEGRVQVLETKPSEMPFEKEELLNAAVRRVDALEAELISTKKALYDALMRQDELLAYIDRQELIKFRKKKFCF

SEQ ID NO: 321 - DNA, 814 bp, Zea mays
  unsure (49)
  unsure (52)
  unsure (61)
  unsure (789)
  unsure (792)
gcgcctctcaccatttgggcccccgcgcactccgccccgcgacgagcgngcnaccaccccngcctctatttctttagcatcgccgcccccaagccatttctctccagcatcgccgccccccctctccgcctcaaggctctcctctcggaggtctgataggcaacccaataatggcagaagtcctatcaggatctcatgaacaccgtctaagcactgccttagatggacactacgacgagaagaggaaatccaatgtggaatacacagaggacgagaagaaagccgtgatcgcggctctgaaaaagaaggctttgagcgcctcacagaagtttaggcattccatgaagagggggaggaagagcagcaaggtgatgtccatctcgattctggataagcgtgaacctgaggaggtgcaggctgtggatgccttccgccagcttcttgtacttgaagagctgctaccatcgcagcatgatgactaccacatgatgctaagatttctcaaggcaagaaagtttgatatcgagaaggcaaagcaaatgtggtctgatatgctgaagtggagaaaggagttcggtgcagataccattctcgaggaattcgaattcgaagaagctgataaggtggcagaatgctaccctcaaggttaccatggggttgataaggaaggcaggcctgtctactttgaacggcttggacagatcgatgtgaataggctaatgcagtcactacatgatcgctttgtcaagaaccatgtcaaggagttcgagaagaactttgctggtaaanttnccagcttgctcatcgccgcgaa

SEQ ID NO: 322 - protein, 214 aa, Zea mays
  UNSURE (207)..(208)
MAEVLSGSHEHRLSTALDGHYDEKRKSNVEYTEDEKKAVIAALKKKALSASQKFRHSMKRGRKSSKVMSISILDKREPEEVQAVDAFRQLLVLEELLPSQHDDYHMMLRFLKARKFDIEKAKQMWSDMLKWRKEFGADTILEEFEFEEADKVAECYPQGYHGVDKEGRPVYFERLGQIDVNRLMQSLHDRFVKNHVKEFEKNFAGKXXSLLIAA

SEQ ID NO: 323 - DNA, 1762 bp, Zea mays
cggagaggcagtgccgagcaggtagggagagaaacagagcgagagaatacccgacctctcgcctccgccctagctaccaaggttcctcctgatcgatcgattcccttccatccaaacccccaacaaaatacgacagtggcggcggtcgaggttcggtgcgagagcgcgacgttccggaatcggcggcggcgaagatgtcggtgagccacgcggaggacatcgagatatcgctgtgtgacggcaactcggaggacgagcggcggcggcgtaagatcggctcgctgcggcggaaggctatccacgcgctcaagaagcgagggaggcgccgcgtcgacttccgcttcccgccggcggccatctccatcgaggacgtccgcgacgccgaggaggagcgcgccgtcgcctccttccgggaccgcctcgccgcgcaccgcctcctccccgacaagcacgacgactaccacatgatgctcaggttcctcaaggccaggaagtttgaagccgataaggcaatgcagatgtggtcggagatgctgaaatggaggaaggagttcggaactgacaccatcctcgaggattttgatttcgcagaactggatgatgtgctgcgctactaccctcagggctaccatggtgtggaccgcgaaggccggcccgtgtacattgagaggctagggaaggtggatcccaacaaactcatgcagatcacgtctgtggatcgctacatcaagtaccatgtccaggagtttgagagagccttcagggagaggttccctgcctgcacattggctgccaagaggcacattgactcgaccactaccatcttggacgtccagggtgtggggtttaagaatttctccaggactgctagagaacttgtaaaccgaatgcagaagattgatagcgattattatcctgagacactccaccaaatgtttgttgtgaacgctggcagtggattcaagtggatctggaacagtgtgaagggcttccttgacccaaaaacttcatccaagattcatgtgctcggttcgaactaccagagtaggcttcttgaagtaatagattcgagtgagttgccagaattccttggtggttcatgcacatgtagtgacaagggtggttgccttggatcgaacaaagggccatggaatgatccttatatattgaagctgatccacaatttggaagctggatgcatgagggaaaccaccaaacccgtttctgagggcggagaaagaagcagctcttcctttcggttggaacagatgaaatggcagggcatgttaagcgatacatcaaatgctgaatcaggatccgatgttgatgattttggtccatcatttgttcataaagtttcaggctatggttgcttgactccggttcgtgaggaggtaaagggcacagattgtgcaacatacttgagctgcgatgatcaaagtcacccggatatggttcctgaattttaccatggagtgcaacggactactgaaatggtgcagaaacaaatggctgatttcaggcaatattccaccaacagaaggcctcgtgaattaggtatcttattttcctatcgttccgggtaattgaattctgaacctgtagttgtttgttaacatttaataaagagtaaggccattgaagatggtgtatgattttctagtgtcatgtcgcgttgaagctctgtaaccatgaattttctgtttgtttgctactgcataaaacaccatcagccatacattccctggtaccataagacttt

SEQ ID NO: 324 - protein, 433 aa, Zea mays
MSVSHAEDIEISLCDGNSEDERRRRKIGSLRRKAIHALKKRGRRRVDFRFPPAAISIEDVRDAEEERAVASFRDRLAAHRLLPDKHDDYHMMLRFLKARKFEADKAMQMWSEMLKWRKEFGTDTILEDFDFAELDDVLRYYPQGYHGVDREGRPVYIERLGKVDPNKLMQITSVDRYIKYHVQEFERAFRERFPACTLAAKRHIDSTTTILDVQGVGFKNFSRTARELVNRMQKIDSDYYPETLHQMFVVNAGSGFKWIWNSVKGFLDPKTSSKIHVLGSNYQSRLLEVIDSSELPEFLGGSCTCSDKGGCLGSNKGPWNDPYILKLIHNLEAGCMRETTKPVSEGGERSSSSFRLEQMKWQGMLSDTSNAESGSDVDDFGPSFVHKVSGYGCLTPVREEVKGTDCATYLSCDDQSHPDMVPEFYHGVQRTTE

SEQ ID NO: 325 - DNA, 910 bp, Zea mays
gacgagctggaacaccgtcaagtcgttcctggaccccaagaccacggccaagatccatgtccttggcaacaagtaccagagcaagctcctggaagtgatcgatgccagcgagctgcccgagttcttcggcggcacttgcaactgcgagggcggctgcatgcgctccgacaaagggccatggaaggaccctgagatcctcaagatggtccaatgcggcatggggagatgcgggatgaacagcggggaccctcgcgacgccgacgagaagctcatcaccgaggacgaaatagtgcccgttcccaagaagcaagactccatgcgccgcaacgccgtggattcccccaaggtggcgcgcgagaagatcgagcacccgcagatgtccccgctccacgagatgaagaccgccagcgacccggaccctgccgccaaggacagcttcgacggcggcgggctgttccccggcgtggacaggggcatggacttcaactggagcggcgaggtgagcgaggagaagctgcagatcgcgcgggacatgtacgcgcagctgccggacgcgtacaagcagggggacgcgggagaccggcaggtggtgtcggggttcatggcgctggtgatgggcgtggtggccatgttccgggtgggcaagatcgcgccgaagcgggccatggacgcggccatgggcatcgccaccatggaggccatggccaagaagacgcggcagatgcagatgcagcagcagctgcagctgggcgggcccgacgccgtcgtggtgtcggcggcgcagtaccaggcgctggtcaagcgcgtggacgacctggaggccaaggtggcggcgctggcgtcgggcccgcccgaggtgccgcccgagctggaggagtcgatcaaggccgccgccgcccgcgtcgacgcg

SEQ ID NO: 326 - protein, 303 aa, Zea mays
TSWNTVKSFLDPKTTAKIHVLGNKYQSKLLEVIDASELPEFFGGTCNCEGGCMRSDKGPWKDPEILKMVQCGMGRCGMNSGDPRDADEKLITEDEIVPVPKKQDSMRRNAVDSPKVAREKIEHPQMSPLHEMKTASDPDPAAKDSFDGGGLFPGVDRGMDFNWSGEVSEEKLQIARDMYAQLPDAYKQGDAGDRQVVSGFMALVMGVVAMFRVGKIAPKRAMDAAMGIATMEAMAKKTRQMQMQQQLQLGGPDAVVVSAAQYQALVKRVDDLEAKVAALASGPPEVPPELEESIKAAAARVDA

SEQ ID NO: 327 - DNA, 1726 bp, Zea mays
gggggggatttctaaaagcaaggaaatttgatatcgacaaagcaaagcaaatgtggatggatatgcttcattggcggagggagtatggcactgatacgattttggaggacttcgaatacactgagttggacgctgttttgcaatattatcctcatggttatcatggagttgacaaagaggggagacccgtttatattgaaaggcttggaaaggttgaccctagcaaacttatgaatgtcacaacgatggatcgatatgtgcgataccatgtgaaggagtttgagaggagcttcttgattaaatttccagcttgctctgttgctgcaaaaacgcacattgattccagcacaacaattctggatgtccagggcgtgggtttgaaaaatttcagcaaaactgcacgtgaattaattcagcgactgcagaaaattgacaatgataactacccagagactctataccaaatgtttattgtcaatgctggtccgggtttccggctactatggaacactgtgaagtccttccttgatcccaaaacgaccgccaagatacatgttcttgggaacaaataccaaagtaagctgcttgaaacaattgacgctagtgaattgccagaattccttggtggcacttgtacctgtcctgaatacggaggttgccttaaggctgaaaagggaccgtggaaggacccaaacatacttaagatagtccaaagtggtggggttcattgtgctcgtcaaattgtaactatttccaatggtgaggaaaaatttattacttacgccaaaccgaagcgccacgcaatgagagggagtgacacatcaactgctgagtctggctcagaagctgatgatgctatctcccccaaagctctcagaagttacatgccacatcctaagttgaccccagttcgtgaagaggtcaaaattgtcagggctacgagcttttctactcgtgtccctgaatatgatgtacctgttgttgacaaggccgtggatgctacatggaagagagagcaaccacgaaagataccattcatgccccaagatgcagactcatctgtgaaaactgcatccaagccatctggccgcccctgggataagatcgctgcaactctgatggcttgtcttatggctattgtaatgttggttcgatcagtcaaagatcttgtcacaaggagattgccatataaaggcgggtcagaagaaatccactctacgctgtacccagaccccatccagaaagaggaattccgtcctccttctccgatccctggatttgctgaagccgacctgttcgccgtggtcttgcaaaggctgggagagcttgaagagaaggttcagatgcttcaagaaaagccttccgaaatgccttgcgagaaagaagagttgcttaacgccgctgtgcgtcgtgtcgatgcattggaagccgaactaattgtaacaaagaaggctttgcacgaggctcttatcaggcaagaggaactgcttgcgtacatcgaccgcaaagagattgccaaggctcagagaaagaagaaagcaatgctttgctactaggacaaggagggagatacttctgcttcctcagaggagatgccaaagatggcgcctgagatgtaaccagcgatccccttcattttcctgacacttgtgaatcttctacaagtttccgttgtaaatcgagaatattctgacatgaataaagtgttttttggcatcaatcctga

SEQ ID NO: 328 - protein, 517 aa, Zea mays
GGFLKARKFDIDKAKQMWMDMLHWRREYGTDTILEDFEYTELDAVLQYYPHGYHGVDKEGRPVYIERLGKVDPSKLMNVTTMDRYVRYHVKEFERSFLIKFPACSVAAKTHIDSSTTILDVQGVGLKNFSKTARELIQRLQKIDNDNYPETLYQMFIVNAGPGFRLLWNTVKSFLDPKTTAKIHVLGNKYQSKLLETIDASELPEFLGGTCTCPEYGGCLKAEKGPWKDPNILKIVQSGGVHCARQIVTISNGEEKFITYAKPKRHAMRGSDTSTAESGSEADDAISPKALRSYMPHPKLTPVREEVKIVRATSFSTRVPEYDVPVVDKAVDATWKREQPRKIPFMPQDADSSVKTASKPSGRPWDKIAATLMACLMAIVMLVRSVKDLVTRRLPYKGGSEEIHSTLYPDPIQKEEFRPPSPIPGFAEADLFAVVLQRLGELEEKVQMLQEKPSEMPCEKEELLNAAVRRVDALEAELIVTKKALHEALIRQEELLAYIDRKEIAKAQRKKKAMLCY

SEQ ID NO: 329 - DNA, 1068 bp, Zea mays
  unsure (1063)
gcggacgcgtggggtaaaatgaagaatgataaccatgtagcctcaatagatgacataagagatggtcaagagctggagattgttgaaaggttccgcgagtgtttaatcgacgagggcttgttgccagaacatcatgatgattatcacatgatgttgaggttcctgaaagcaaggaaatttaatattgacaaagcaaagcagatgtggtcagagatgcttagatggaggaaggaatttggtgctgacgatataaaggaattcgactacactgaattagatgaagttgtgaagtactatccacaactttaccatggtgtggacaaaggtggaaggcctatttacatagaactaattgggaaagttgataccaacaaactagtgcaaataacaactattgaccgctatttaaaatatcatgtcaaggagttcgagagatgtctccagatgaggtttccagcttgttctattgctgcgaaaaggcacatagactcgtctactacgatattggatgtgaaaggcgtgagcctaaagaacttcacaaaagatgcaagagagctaattatgcggttgcagaatatcaacaataacaactatccagagaccttacagcaactgtgcatcataaatgctggccaaggcttcaagatgttatggggtacaataaaatcatttcttgatccagaaactgcttcaaaaattcatgtccttggaaacaagtaccaaactaaattacttgaaataattgatgacagtgaactaccagaatttcttggtggcaagtgcagatgtgaagagtatggaggttgtctgaaatcaaataaaggcccttggaaggaccctgaaattgttaagaaggttatcaatggtgaggcaaactatgttaggcaagttattgctgtatcaaacataaatcaaaaggaagttagttgtactgaacactcaactgaggaaaaagtcaacgatgcctctgtcgaatctatttctgaagtggaagatgtttcttcttcaacggctttaatggatcacatcataagccctaatttgacctttgtggatgagtcanaattt

SEQ ID NO: 330 - protein, 321 aa, Zea mays
MKNDNHVASIDDIRDGQELEIVERFRECLIDEGLLPEHHDDYHMMLRFLKARKFNIDKAKQMWSEMLRWRKEFGADDIKEFDYTELDEVVKYYPQLYHGVDKGGRPIYIELIGKVDTNKLVQITTIDRYLKYHVKEFERCLQMRFPACSIAAKRHIDSSTTILDVKGVSLKNFTKDARELIMRLQNINNNNYPETLQQLCIINAGQGFKMLWGTIKSFLDPETASKIHVLGNKYQTKLLEIIDDSELPEFLGGKCRCEEYGGCLKSNKGPWKDPEIVKKVINGEANYVRQVIAVSNINQKEVSCTEHSTEEKVNDASVESI

SEQ ID NO: 331 - DNA, 1341 bp, Oryza sativa
  unsure (1338)
gcacgagatcactcggcagcagcaggagcttccctctctttttggtccaaaatcatcgcccaaaatccgaggttggagcttttgctcgggcgattgattttggaatcggaggaggggatgtcaggaccactcgatcgatttgccaggccatgttttgaaggttttacgcataatgatgaaaagaaagagatcagatctgacgcagacaactccgaaggagagaagaagactaaaattggttctttcaagaaaaaggcgattaatgccgggaacaaattcaggcattccctgaggagaagaagcaaaaagaaaaatgaacctcggggttccattgaggacataagggatgttcaagatcttcaagctgttgatgcatttcgacaatgtttagttgatgaggacctgttgccgcaacagcatgatgattatcacacaatgcttaggttcctcaaagcacggaaatttgatgttgagaaagcaaagagtatgtggtcagatatgcttaaatggagaaaggaatttggggctgacaatatagaggagtttgactacaccgaggcggatgaggttatgaaatattatccacaattttaccatggagtggataaagaaggaaggcctatctacatagagttaataggaaaagttgatgcgaataagctaatgcaagtaactactatagagcgatatgtgaaatatcatgtgaaggagtttgagagatgcttccaaatgagatttcctgcctgctcgattgctgcaaaaaggcccatagattcatctactactattctggacgtgcaaggcgtgggtttaaagaacttctcaaaagctgcaagggatctaatcacacgactgcagaagatcgacaatgacaactacccagagacgttgcgccgcatgtatattattaatgccggccaaggcttcaagatgttatggagcactgtaaaatctttcctagatcctaaaactgcttcaaagattcatgttctaggaagcaagtaccaaaataagttacttgaaataattgatgagaatgaattgccagagttttttggtggaaaatgcaagtgcgaggcatttggaggttgcaaaaaatcagataaaggtccttggaaggatcctaacataataaagagggtcctgaatggcgaagcaaattatgggaggcaaattgtgaccatatcaagcactgatggaaaaataattcgttatgctgggccacaatacccaacaagaaaaggaagtgatggctcagcggagtctgggtctgaagtggaagatggcgcgtcacctatggcatcaaggaacgtcttcaccgattggcgcagaagcttngaa

SEQ ID NO: 332 - protein, 406 aa, Oryza sativa
MSGPLDRFARPCFEGFTHNDEKKEIRSDADNSEGEKKTKIGSFKKKAINAGNKFRHSLRRRSKKKNEPRGSIEDIRDVQDLQAVDAFRQCLVDEDLLPQQHDDYHTMLRFLKARKFDVEKAKSMWSDMLKWRKEFGADNIEEFDYTEADEVMKYYPQFYHGVDKEGRPIYIELIGKVDANKLMQVTTIERYVKYHVKEFERCFQMRFPACSIAAKRPIDSSTTILDVQGVGLKNFSKAARDLITRLQKIDNDNYPETLRRMYIINAGQGFKMLWSTVKSFLDPKTASKIHVLGSKYQNKLLEIIDENELPEFFGGKCKCEAFGGCKKSDKGPWKDPNIIKRVLNGEANYGRQIVTISSTDGKIIRYAGPQYPTRKGSDGSAESGSEVEDGASPMASRNVFTDWRRS

SEQ ID NO: 333 - DNA, 2334 bp, Oryza sativa
gcacgagatcactcggcagcagcaggagcttccctctctttttggtccaaaatcatcgcccaaaatccgaggttggagcttttgctcgggcgattgattttggaatcggaggaggggatgtcaggaccactcgatcgatttgccaggccatgttttgaaggttttacgcataatgatgaaaagaaagagatcagatctgacgcagacaactccgaaggagagaagaagactaaaattggttctttcaagaaaaaggcgattaatgccgggaacaaattcaggcattccctgaggagaagaagcaaaaagaaaaatgaacctcggggttccattgaggacataagggatgttcaagatcttcaagctgttgatgcatttcgacaatgtttagttgatgaggacctgttgccgcaacagcatgatgattatcacacaatgcttaggttcctcaaagcacggaaatttgatgttgagaaagcaaagagtatgtggtcagatatgcttaaatggagaaaggaatttggggctgacaatatagaggagtttgactacaccgaggcggatgaggttatgaaatattatccacaattttaccatggagtggataaagaaggaaggcctatctacatagagttaataggaaaagttgatgcgaataagctaatgcaagtaactactatagagcgatatgtgaaatatcatgtgaaggagtttgagagatgcttccaaatgagatttcctgcctgctcgattgctgcaaaaaggcccatagattcatctactactattctggacgtgcaaggcgtgggtttaaagaacttctcaaaagctgcaagggatctaatcacacgactgcagaagatcgacaatgacaactacccagagacgttgcgccgcatgtatattattaatgccggccaaggcttcaagatgttatggagcactgtaaaatctttcctagatcctaaaactgcttcaaagattcatgttctaggaagcaagtaccaaaataagttacttgaaataattgatgagaatgaattgccagagttttttggtggaaaatgcaagtgcgaggcatttggaggttgcaaaaaatcagataaaggtccttggaaggatcctaacataataaagagggtcctgaatggcgaagcaaattatgggaggcaaattgtgaccatatcaagcactgatggaaaaataattcgttatgctgggccacaatacccaacaagaaaaggaagtgatggctcagcggagtctgggtctgaagtggaagatggcgcgtcacctatggcatcaaggaacctgataacaaatccccttttgacccctgttcatgaggagtcaaaattggcagcacatggatttacatctgcttccccttccattattgaagaaagcattcctgttgttgacaaggttgtggatgatggatggggcagtcctagagctagttcatcaccctcgagaagtttgcctatcacatttgatggcctctggacacaagttatcacatggctgactgtcttgatcgtgagcctttttgctatggttcgctctgtcccaagcaggatggctaaaagattctcaagccaatccactgaccatgatcactcctatgtggagtatcctcaagaagcagagtacaaggaagaattccggccaccgtctcctgctccgtcttatactgaaaaggatgtcctctcatctatggtaagacgactaggcgagttggaggagaaggtgcaggcgctcgaaacgaagccatccgagatgccatttgaaaaggaggaattgctgaatgcagccgtccgccgtgtggatgcattagaagccgagttaatctctacaaagaaggctctctatgaagccctgatgcggcaggacgagctgcttgcgtacattgacaagcaagatatgatcaagtttcgtaaaaagaaattctgcttctagcagctcaacgacgagttaattctccatacacagagctgttcgtgtatatttggatcaattaatcaccacgaatatgaatgaatgcagctagtttggagtgtaaaattaaaagtgtgcatatggcaaattgagaatccaacaataacaccacggtatcggtatgtgagttacaaggtggaccttgaggtgttgttggctggtcattcagaatccagacgatgcatcgtcttgtgctggagggtcctggctgctgtaaattaagcctgtaattaatcttgtgacttgtaacatatatagcacaaatgtgagttaaaatcgttgtaaatggacttcaccttgaaaaaaaaaaaaaaaaaaaaaaaaaaaaaaaaaaaa

SEQ ID NO: 334 - protein, 613 aa, Oryza sativa
MSGPLDRFARPCFEGFTHNDEKKEIRSDADNSEGEKKTKIGSFKKKAINAGNKFRHSLRRRSKKKNEPRGSIEDIRDVQDLQAVDAFRQCLVDEDLLPQQHDDYHTMLRFLKARKFDVEKAKSMWSDMLKWRKEFGADNIEEFDYTEADEVMKYYPQFYHGVDKEGRPIYIELIGKVDANKLMQVTTIERYVKYHVKEFERCFQMRFPACSIAAKRPIDSSTTILDVQGVGLKNFSKAARDLITRLQKIDNDNYPETLRRMYIINAGQGFKMLWSTVKSFLDPKTASKIHVLGSKYQNKLLEIIDENELPEFFGGKCKCEAFGGCKKSDKGPWKDPNIIKRVLNGEANYGRQIVTISSTDGKIIRYAGPQYPTRKGSDGSAESGSEVEDGASPMASRNLITNPLLTPVHEESKLAAHGFTSASPSIIEESIPVVDKVVDDGWGSPRASSSPSRSLPITFDGLWTQVITWLTVLIVSLFAMVRSVPSRMAKRFSSQSTDHDHSYVEYPQEAEYKEEFRPPSPAPSYTEKDVLSSMVRRLGELEEKVQALETKPSEMPFEKEELLNAAVRRVDALEAELISTKKALYEALMRQDELLAYIDKQDMIKFRKKKFCF

SEQ ID NO: 335 - DNA, 574 bp, Glycine max
  unsure (495)
  unsure (511)
  unsure (528)
  unsure (538)
atgtagcttcgctctcacattgacccttgaaaccacaatgtccggcccgctcgaccgcttcgctagaccctgtttcgaaggattctccgggagtgatgagaagaaggaaaggagatctgattttgagaactccgaagatgaaagaagaacgagaattggatctctgaagaagaaagcgcttaacgcgtcctccaagttcaagcattcgctcaagaaaaagagcagcagaaggaaaagcgatggccgtgttagctctgtttcgatcgaagatgttcggaacttcgaggagcagcaggccgttgatgcatttcgccaagccttgatcatggaagaattgcttcctgaaaaacacgatgattaccacgtcatgttaaggttcctgaaagcaaggaagtttgatattgaaagggcaaagcatatgtgggctgatatgctacaatggaggaaagagtttgggtaccggcactattatggacggattttgagttcaaagangtaagatgcacttgtnaacgtattattcccaanggccaatcanggtggttggactacgggagcgggaggcctttctact

SEQ ID NO: 336 - protein, 140 aa, Glycine max
MSGPLDRFARPCFEGFSGSDEKKERRSDFENSEDERRTRIGSLKKKALNASSKFKHSLKKKSSRRKSDGRVSSVSIEDVRNFEEQQAVDAFRQALIMEELLPEKHDDYHVMLRFLKARKFDIERAKHMWADMLQWRKEFG

SEQ ID NO: 337 - DNA, 982 bp, Glycine max
  unsure (715)
  unsure (916)
  unsure (948)
gcacgaggtttgtctcgcaattgatcatcgcaaccacaatgtccggtcccctcgatcgttttgccagaccttgctttgaggggttttcgggcagtgacgagaagaaggagaggagatctgacttcgagaactccgaggatgaaaggaggaccagaattggatctctcaaaaagaaggcacttaatgcatcctccaaattcaaacacactcttagaaagaagagtagcaggaggaaaagcgatggccgtgttagctccgtttcaattgaggacgttcgcgatttcgaggagctccaggctgtcgacgcctttcgccaatccttgatcatggacgaattgctccccgaagcctttgatgattaccatatgatgttaagatttttgaaagcgaggaagtttgatattgaaaaggcaaagcatatgtggactgacatgctacaatggaggaaggagtttggtgctgatactattatgcaggattttgagttcaaggagttagatgaagtcgtgaagtattatccacatgggcatcatggcatcgacaaggagggaaggcctgtttatattgaaagacttggaaaggtcgatccaaacaaacttatgcaagttacaactttggataggtatgtgaagtaccatgtgcaggagtttgagaaagcttttgcaatcaagtttcctgcttgctctattgctgccaagaggcacattgattccangcaccacaatcttagatgttcacggagtgggccttaagaactttacaaagtctgcccgggaactcattacccgattgcaagaagattgatggtgacaattaccctgagactctttgccaaatgtttattataaatgctgggcctggatttaagctgttgtggagcactgtcaagtcttttctcgattccaaaacaacttcnaagattcaagttcctgggaacaagtatcaaancaaattgctgaagttataaatccaagtgagtttg

SEQ ID NO: 338 - protein, 308 aa, Glycine max
  UNSURE (303)
MSGPLDRFARPCFEGFSGSDEKKERRSDFENSEDERRTRIGSLKKKALNASSKFKHTLRKKSSRRKSDGRVSSVSIEDVRDFEELQAVDAFRQSLIMDELLPEAFDDYHMMLRFLKARKFDIEKAKHMWTDMLQWRKEFGADTIMQDFEFKELDEVVKYYPHGHHGIDKEGRPVYIERLGKVDPNKLMQVTTLDRYVKYHVQEFEKAFAIKFPACSIAAKRHIDSSTTILDVHGVGLKNFTKSARELITRLQKIDGDNYPETLCQMFIINAGPGFKLLWSTVKSFLDSKTTSKIQVPGNKYQXKLLKL

SEQ ID NO: 339 - DNA, 2206 bp, Glycine max
gcacgaggtttgtctcgcaattgatcatcgcaaccacaatgtccggtcccctcgatcgttttgccagaccttgctttgaggggttttcgggcagtgacgagaagaaggagaggagatctgacttcgagaactccgaggatgaaaggaggaccagaattggatctctcaaaaagaaggcacttaatgcatcctccaaattcaaacacactcttagaaagaagagtagcaggaggaaaagcgatggccgtgttagctccgtttcaattgaggacgttcgcgatttcgaggagctccaggctgtcgacgcctttcgccaatccttgatcatggacgaattgctccccgaagcctttgatgattaccatatgatgttaagatttttgaaagcgaggaagtttgatattgaaaaggcaaagcatatgtggactgacatgctacaatggaggaaggagtttggtgctgatactattgtgcaggattttgagttcaaggagttagatgaagtcgtgaagtattatccacatggccatcatggcgtcgacaaggagggaaggcctgtttatattgaaagacttggaaaggtcgatcctaacaaacttatgcaagttacaactttggatagatatgtgaagtaccatgtgcaggagtttgagaaagcttttgcaatcaagtttcctgcttgctctattgctgccaagaggcacattgattccagcaccacaatcttagatgttcacggagtgggccttaagaactttacaaagtctgcccgggaacttattacccgattgcagaagattgatggtgataattaccctgagactctttgccaaatgtttattataaatgctgggcctggatttaggctgttgtggaacactgtcaagtcttttctcgatcccaaaacaacttctaagattcatgttcttggaaacaagtatcaaagcaaattgcttgaagttatagatgccagtgagttgccagaatttctgggaggtacctgcacttgtgaagatcagggaggttgccttagatctgataaaggcccctggaaaaaccctgatatattcaagatggttctcactggtggagcatggcggtcaaaacaagttgtaaaagttcttaacaatgaaagaaaggttattgtgtatgccaagccaggatacccgatggtaaaaggcagtgatacatccactgctgaatcagggtcagaagccgaagatatatcctctccaaaagcgatgaagagttattcacaccttacgttgacccctgttcatgaggaagctaagatagtaggaaaaacaagctatgccagcaacttgtctgggtatgatgaatatgttccaatggtagacatacctgttgatgctggttggaagaagcaagcatctctacagaggtcttacacctctaaaggagcacctcctcctgacactcagaaaactcctgaagggattcaagctcggatgtgggtagcactgtctatcttcttcttgactgtattaactctcttacgccaagttgcataccctgtgaccaagaaatttccagcattatcttccaatgatgataagagtacttcaaaaccacctcctgatacaacaaacatggaagttcttcctccttcatcaactccatcatgtacagaggaaaatctccttccctccatgctgaaaaggttaggtgagcttgaagagaaggttgacacactccaatctaagccatctgagatgccttatgagaaagaggaattgttgaatgctgctgtatgccgggtggatgctttggaagctgagttaattgctactaaaaaggctctatatgatgcattaatgaggcaagaagagctgcttgcttacattgacagacaagaagaagccaagttgcggaaaaagaagttttgctggtgagatttatgaatgggaaagagattctgcagaggatgtctcaaagtgcaggttgttcttaaggaatgttaaccttgcgcatgatgtaactctgaccactgattttcagtatacgagtaaacataatggagaattgtttcaacgtgtgtatattcagaatgctatctttgctggcttgtaaaacacgagcctttttgcttttgttatggtcataccttcatctatccttgttacaatttgtttgcctttgttagtcgaaaagctttttcccctcctaaaaaaaaaaaaaaaaaaaa

SEQ ID NO: 340 - protein, 624 aa, Glycine max
MSGPLDRFARPCFEGFSGSDEKKERRSDFENSEDERRTRIGSLKKKALNASSKFKHTLRKKSSRRKSDGRVSSVSIEDVRDFEELQAVDAFRQSLIMDELLPEAFDDYHMMLRFLKARKFDIEKAKHMWTDMLQWRKEFGADTIVQDFEFKELDEVVKYYPHGHHGVDKEGRPVYIERLGKVDPNKLMQVTTLDRYVKYHVQEFEKAFAIKFPACSIAAKRHIDSSTTILDVHGVGLKNFTKSARELITRLQKIDGDNYPETLCQMFIINAGPGFRLLWNTVKSFLDPKTTSKIHVLGNKYQSKLLEVIDASELPEFLGGTCTCEDQGGCLRSDKGPWKNPDIFKMVLTGGAWRSKQVVKVLNNERKVIVYAKPGYPMVKGSDTSTAESGSEAEDISSPKAMKSYSHLTLTPVHEEAKIVGKTSYASNLSGYDEYVPMVDIPVDAGWKKQASLQRSYTSKGAPPPDTQKTPEGIQARMWVALSIFFLTVLTLLRQVAYPVTKKFPALSSNDDKSTSKPPPDTTNMEVLPPSSTPSCTEENLLPSMLKRLGELEEKVDTLQSKPSEMPYEKEELLNAAVCRVDALEAELIATKKALYDALMRQEELLAYIDRQEEAKLRKKKFCW

SEQ ID NO: 341 - DNA, 563 bp, Glycine max
  unsure (104)
  unsure (492)
  unsure (500)
  unsure (531)
  unsure (544)
  unsure (549)
caacaatggaacgctatctcaagtaccatgtaaaagagtttgaaaggaccttcgctgttaagttgcctgcatgttctatcgcggcaaagaagcacattgaccanagcacaactattttggatgttcaaggagtgggtcttaaaagtttgaacaaagctgcaagggatctcctccagaggcttcagaaaattgacggtgacaactaccctgagtcactgaaccgtatgttcatcatcaatgctggttctggatttaggctcttgtggaacaccattaagtcattcctagatcccaagaccacctcaaaaaccatgtcctaggtaacaaataccagagcaattgcttgaaatcattgatgccagtgaactccagattcttgggtggtacttgtacttgtgcagataaagtggtgtatgcttctgacaagggccatggatgaccagatacttgaagatggtcacaatggcaaggaaatcaagagaaaacttatcnggatgagngaaaagacatagaagaggacgcaatcaaacnggaacaagatcantcagnagatcaagttgttt

SEQ ID NO: 342 - protein, 159 aa, Glycine max
ARATMERYLKYHVKEFERTFAVKLPACSIAAKKHIDQSTTILDVQGVGLKSLNKAARDLLQRLQKIDGDNYPESLNRMFIINAGSGFRLLWNTIKSFLDPKTTSKIHVLGNKYQSKLLEIIDASELPEFLGGTCTCADKGGCMLSDKGPWNDPDILKMV

SEQ ID NO: 343 - DNA, 1368 bp, Glycine max
  unsure (1246)
  unsure (1282)
gcacgagcaacaatggaacgctatctcaagtaccatgtaaaagagtttgaaaggaccttcgctgttaagttgcctgcatgttctatcgcggcaaagaagcacattgaccaaagcacaactattttggatgttcaaggagtgggtcttaaaagtttgaacaaagctgcaagggatctcctccagaggcttcagaaaattgacggtgacaactaccctgagtcactgaaccgtatgttcatcatcaatgctggttctggatttaggctcttgtggaacaccattaagtcattcctagatcccaagaccacctcaaaaatccatgtcctaggtaacaaataccagagcaagttgcttgaaatcattgatgccagtgaacttccagagttcttgggtggtacttgtacttgtgcagataaaggtggttgtatgctttctgacaagggtccatggaatgacccagatatcttgaagatggttcacaatggcgagggcaaatgcaagagaaaaaccttatctgggattgaggagaaaagaatcatagaagatggtactgcaaatcaaaatctaggaaacaaagaatcatttccagagagatacgatgttgatgtacaatgtttatctccaaaaaagcaatgtactgtgtataaatatgacgcatttgtccctgtgcttggcaagccagtcgattcatcttggaatacattaacacagaaagataaagatgctctttctaaaggtgcagattgttttcctagcaagacttgtgatgggtatagcaatcactttgttggaggaatcatggccattgttatgggaattgtaacaatgatccgcatgacaaggaacatgccaaggaaaatcacagaagcagcactgtatggcagctcagggtattatgatggcactatgatgaaagcagccaccttttcatgcaatgattacatggccatgatgaagcgcatggctgaactagaagagaaagtcactatccttagcatgaaacctgtcattccacccgaaaaggaggaagtgctgaataatgctctaggcagagtcaccactatcgaacatgacttggttgcaacaaaaaaggcacttgatgatgccccttgccgacaagtagactcccaagctcaaattgacaagaagaagaacagcaacaagaagttgttccgcttccgctgtttcgctacgtgatttcaaatgttttactgcatcaggaagagttgtaaaactggaggttttntacttcgactgcctattcagtgtttgattaaaaaanttctgtccaatataaagtttgccatcccttgaaaaaaaaaaaaaaaaaaaaaaaaaaaaaaaaaaaaaaactcgagactagttctc

SEQ ID NO: 344 - protein, 398 aa, Glycine max
ARATMERYLKYHVKEFERTFAVKLPACSIAAKKHIDQSTTILDVQGVGLKSLNKAARDLLQRLQKIDGDNYPESLNRMFIINAGSGFRLLWNTIKSFLDPKTTSKIHVLGNKYQSKLLEIIDASELPEFLGGTCTCADKGGCMLSDKGPWNDPDILKMVHNGEGKCKRKTLSGIEEKRIIEDGTANQNLGNKESFPERYDVDVQCLSPKKQCTVYKYDAFVPVLGKPVDSSWNTLTQKDKDALSKGADCFPSKTCDGYSNHFVGGIMAIVMGIVTMIRMTRNMPRKITEAALYGSSGYYDGTMMKAATFSCNDYMAMMKRMAELEEKVTILSMKPVIPPEKEEVLNNALGRVTTIEHDLVATKKALDDAPCRQVDSQAQIDKKKNSNKKLFRFRCFAT

SEQ ID NO: 345 - DNA, 786 bp, Glycine max
  unsure (676)
  unsure (731)
acgagagaagaaggaagttgaagtgacggaagagaagaaggaagtggaagtgaccgaaggaaagaaagaagtggaagtgatcgaagagaagaaggaaacagaagtgacagaagaaaagaaagaagtggaagtagaagtgagggaagagaagaaggaaagtgaagtgaaagaagaagaaaaaggtcgggaggttgttccagaggaagttgagatatggggaattcccctgctgggggacgagaggagcgatgtgattctgctaaagtttcttagggcaagggatttcaaggtgaaggaggccttgaacatgataagaaacacggtgcgatggagaaaggaatttggaatagagggtctagtggaggaagatcttggaagtgattgggagaaggtggtgttcaaggatggatacgacaaagaagggcacccggtgtactacaacgtctttggggagtttgaggacaaggagttgtacagcaagacgtttttggacgaggaaaagaggaacaagttcataaggtggaggattcagtcgttggagaagagcgttagaagccttgacttctctccgaatgggatatcgacaatagttcaggtgaacgaccttaagaactctcccggactgggcaagagggaactgaggcaggccaccaatcaggcccttcaactgcttcangacaactaccctgagttcgttgccaagcagatattcatcaatgtcccctggtggntacttgccttttctaggatgatcagtcccttcttcacacagaggaccaagagtaa

SEQ ID NO: 346 - protein, 261 aa, Glycine max
  UNSURE (225)
  UNSURE (244)
REKKEVEVTEEKKEVEVTEGKKEVEVIEEKKETEVTEEKKEVEVEVREEKKESEVKEEEKGREVVPEEVEIWGIPLLGDERSDVILLKFLRARDFKVKEALNMIRNTVRWRKEFGIEGLVEEDLGSDWEKVVFKDGYDKEGHPVYYNVFGEFEDKELYSKTFLDEEKRNKFIRWRIQSLEKSVRSLDFSPNGISTIVQVNDLKNSPGLGKRELRQATNQALQLLXDNYPEFVAKQIFINVPWWXLAFSRMISPFFTQRTKS

SEQ ID NO: 347 - DNA, 564 bp, Glycine max
  unsure (468)
gcacgagcagaagtttagctgaggtttctgttccactgaattggttttatctgttgggggccttgaatttgatgttttctttcgtccacaaaacaactttcatattcatttaacagtgttcacatgtcagggcctcttgatcggtttgcacgtccctgctttgaagggttctctggtcatgatgaaaggagggagaggaaatcagattttgagaactcggaagacgataggcgaacaaggattggtagcttgaaaaagagagcaatcaatgcttcaagcaagttcaggcattctcttaggaagaagagcagcaggagaaagactgcaagccgaagcaattcggtttccattgaggatgttcgagatgttaaggagcttcaagcagtggatgaatttcgacaggcgcttatattggataacttggtggcaacgagacatgatgactatcaaacgttactgagattcttngaaacaagggaatttgaaattgaaaacaaaacagatttgggcaacaatatcaactggggaaaccaattggcccgaaaattagggtgaattcttttt

SEQ ID NO: 348 - protein, 133 aa, Glycine max
  UNSURE (115)
MSGPLDRFARPCFEGFSGHDERRERKSDFENSEDDRRTRIGSLKKRAINASSKFRHSLRKKSSRRKTASRSNSVSIEDVRDVKELQAVDEFRQALILDNLVATRHDDYQTLLRFXETREFEIENKTDLGNNIN

SEQ ID NO: 349 - DNA, 466 bp, Glycine max
  unsure (18)
  unsure (46)
  unsure (50)
  unsure (168)
  unsure (221)
  unsure (301)
  unsure (321)
  unsure (335)
  unsure (339)
  unsure (346)..(347)
  unsure (359)
  unsure (419)
  unsure (421)
  unsure (433)
  unsure (447)
  unsure (449)
cttcgttgacatgtctancaatctctgctttgaaggaatggatganaggngagagaggaagttgagttttgagaataattctgaggatgatagatgggcaaaaattggtagcctgaaaaagaaagcattattcgcgtccaccaaatttagacattcttttaagaaganaagaagcagaaaaattgatagcaggagcaattccctctccattgaggatgtgngagatgttaaagaccttcaagcagtggatgcatttcgacaggcactagtgttagataacatgcttcctccaatacatgangactatcatatgctaatganattctgaaagcaangagnttgatanngagaaagcaaancacatgtgggccaatatgatccaatggaggaaagaatatggtacagatacatttatggangnatttgaaatcanggagttgatgagtncngaagtactacccgctag

SEQ ID NO: 350 - protein, 164 aa, Glycine max
TSFVDMSTNLCFEGMDERRERKLSFENNSEDDRWAKIGSLKKKALFASTKFRHSFKKKRSRKIDSRSNSLSIEDVRDVKDLQAVDAFRQALVLDNMLPPIHDDYHMLLRFLKARKFDIEKAKHMWANMIQWRKEYGTDTIMEDFEFKELNEVLKYYPHGYHGCR

SEQ ID NO: 351 - DNA, 1785 bp, Glycine max
atgtctaccaatctctgctttgaaggaatggatgaaaggcgagagaggaagttgagttttgagaataattctgaggatgatagatgggcaaaaattggtagcctgaaaaagaaagcattattcgcgtccaccaaatttagacattcttttaagaagaaaagaagcagaaaaattgatagcaggagcaattccctctccattgaggatgtgcgagatgttaaagaccttcaagcagtggatgcatttcgacaggcactagtgttagataacatgcttcctccaatacatgatgactatcatatgctattgagattcttgaaagcaaggaagtttgatattgagaaagcaaagcacatgtgggccaatatgatccaatggaggaaagaatatggtacagatacaattatggaggattttgaattcaaggagttgaatgaagtcctgaagtactacccgcatggttatcatggtgtagatagggaaggaagacctgtttatattgagaggctagggaaagttgatcccaataggcttatgcaagtaactaccttggaaaggtatttgagataccatgtgcagggttttgagaaaacatttgctgttaagtttccggcttgctcaatagctgctaaaagacacatagattcaagtacaaccattttggatgttcaaggcgtgggcttcaaaaacctaacaaagtctgcacgggaactcatcacccggctgcagaagattgatggtgattactatcctgaaacactctgccaaatgtttatcattaatgctggtcctggttttaagatgctctggaacacggtgaaaacatttcttgatcccaaaactacttcaaagagtcatgttcttggaaacaacgtgctcactgataaaatacttgagattatagatgagagtgagctgccagaatttcttgctggtagttgcacttgtgtagatcaaggtggttgtatgaggtctgataaagggccatggcaagacccaaacattttaaagatggttgtctatgtggtgaagttagatgtttttagcaaaatagtaacagtttccaatgatgaggggagggtgattgaatgtgacaagatatcttatccaatgattagaggtagcgatacatctacaggagaatcaggatctgaagttgaagatatagcttctcccaaagcatgtgggaattgtataagctctatgttaactcctgtccttgaagaagcaagaatggttggcaagactagtcatgctggaagtttagttgagtatgttcccatggttgacaaagccattaatgttggatcaaaggaaaagcaagcaacacctcgaaagttattttgttcaacagcgggcttcattttggccctatatacttttgctcgatcaataacatttcgtgtcactaagggaatgcggtactcagaatctaattctgccagaaatatacttaacatgactgttgactcaatatccaagggggaatctcgtcctccttcatattctcccggcggattcacaaaggcaaaccttccctcatctaccttaaaacgccttggtgagcttgaagagaaagttgatatgctacagtcaaagcctagtgtgatgccacatgagaaagaggagctacttaatgctgctgtttatcgtgtcgatgcattggaagcagagttgattgctacaaagaaggctttgtacgaagctttgataagacaagaagagcttatggcatatatagacagtcaggaaagagacaaattcaagagaaagggttgctggtga

SEQ ID NO: 352 - protein, 594 aa, Glycine max
MSTNLCFEGMDERRERKLSFENNSEDDRWAKIGSLKKKALFASTKFRHSFKKKRSRKIDSRSNSLSIEDVRDVKDLQAVDAFRQALVLDNMLPPIHDDYHMLLRFLKARKFDIEKAKHMWANMIQWRKEYGTDTIMEDFEFKELNEVLKYYPHGYHGVDREGRPVYIERLGKVDPNRLMQVTTLERYLRYHVQGFEKTFAVKFPACSIAAKRHIDSSTTILDVQGVGFKNLTKSARELITRLQKIDGDYYPETLCQMFIINAGPGFKMLWNTVKTFLDPKTTSKSHVLGNNVLTDKILEIIDESELPEFLAGSCTCVDQGGCMRSDKGPWQDPNILKMVVYVVKLDVFSKIVTVSNDEGRVIECDKISYPMIRGSDTSTGESGSEVEDIASPKACGNCISSMLTPVLEEARMVGKTSHAGSLVEYVPMVDKAINVGSKEKQATPRKLFCSTAGFILALYTFARSITFRVTKGMRYSESNSARNILNMTVDSISKGESRPPSYSPGGFTKANLPSSTLKRLGELEEKVDMLQSKPSVMPHEKEELLNAAVYRVDALEAELIATKKALYEALIRQEELMAYIDSQERDKFKRKGCW

SEQ ID NO: 353 - DNA, 1341 bp, Triticum aestivum
gcacgagatgttatggagcacaataaaatcattcctcgatccaaaaactgcttccaagatccatgttcttgggaataagtatcaacataagttgctcgaaataattgacgagtgtgaactgccagaatttcttggtggcaaatgcaattgtattgaaggttgccaaagatctgacaaaggtccttggaaggatcccaacataataaagagagtcctcaatgacgaggcaaactacggcagacaaattgtgaccatatccagcattgatggaaaaataatacgttatgctaggccagatcacccaactagaaaagggagtgatgcatctgccgagtctggatctgaagtggaagatgtaacatctcctactgcatcaaggaacctgattacacatcctattttgacccctgttcacgaagagtcaaaattgtcgccacatggttccacatttgttgctcatgcttctattgaagaaaacattcctgttgtagacaaggttgtggatgatggatggggtactcccagaggtagtctccaagcttcttcaggttcgttgccctcgagaaacacgcacggcacattcgaaggactgagagttcaagctgtcgcatggctgacgttcttgatcacggcccttttcgccacgctctgttccgtcccgagcaagatggccagaaggatctccagccagtctagcaagcacgacgactaccgcggcgagtatcctcaagaggaggaggagcacaaggaggagttccggcctccgtctcctgccccgtcctacacggagaaggacgtgctctcgtcgatgctgagacggctcggtgagctggagggcagggtgcaggtgctcgagacgaagccgtccgagatgccgtttgagaaggaggagctgctcaacgcagccgtccgccgcgtggacgcgctggaagccgagctgatctccacgaagaaggccctttacgatgctctgatgcgacaggatgagctgctcgcgtacattgacaggcaggagctgatcaagttccgtaaaaagaagttctgcttctaagatctgaccatggagcagctggtcatgtccggagccgttcgtgtatattgttggatcgcggctagtacggtgaatgatgtaatgtgtccatctgtacaagtgtgtaacggaacggtgtaagtatagtaggaaaacaatgtgttagctgtgcggtagcacttgtgtgctagcctaaattgtaatcttgcaagtcggtgcatagctgattgcgcaccaatacgtagttatgaatggaatcgcactcgtgttcgtataaaataaaataaattagcaaaaaaaaaaaaaaaaaa

SEQ ID NO: 354 - protein, 349 aa, Triticum aestivum
HEMLWSTIKSFLDPKTASKIHVLGNKYQHKLLEIIDECELPEFLGGKCNCIEGCQRSDKGPWKDPNIIKRVLNDEANYGRQIVTISSIDGKIIRYARPDHPTRKGSDASAESGSEVEDVTSPTASRNLITHPILTPVHEESKLSPHGSTFVAHASIEENIPVVDKVVDDGWGTPRGSLQASSGSLPSRNTHGTFEGLRVQAVAWLTFLITALFATLCSVPSKMARRISSQSSKHDDYRGEYPQEEEEHKEEFRPPSPAPSYTEKDVLSSMLRRLGELEGRVQVLETKPSEMPFEKEELLNAAVRRVDALEAELISTKKALYDALMRQDELLAYIDRQELIKFRKKKFCF

SEQ ID NO: 355 - DNA, 1259 bp, Triticum aestivum
  unsure (1047)
  unsure (1102)
  unsure (1112)
  unsure (1137)
  unsure (1159)
  unsure (1161)
  unsure (1164)
  unsure (1169)
  unsure (1180)..(1181)
  unsure (1185)
  unsure (1193)
  unsure (1213)
  unsure (1229)
  unsure (1235)..(1236)
  unsure (1248)
  unsure (1252)
acgaagttatgaagtattatccacagttttaccatggggtggataaagatggaagacctgtctatgtggagttaataggaaaagttgatgccaacaaggtgctgcaagtaacaactatagaccgatatgtgaaatatcatgtcaaggagtttgagaaatgtttccagatgagatttccagcttgctcaattgctgcaaaacggcacctggactcatgcacaactattctggatgtgcaaggcgtgggattgaagaacttctcgaaatgtgcaagggaactaatcacccgactgcagaagattgacagtgacaactacccagagacattatgccggatgtacataattaatgctggccaaggcttcaagatgttatggggcacaataaagtcttttcttgattcgaaaactgcttcaaagattcatgttcttggaaccaagtaccaaaataagctacttgaaataattgatgagagtgaattgccagaattttttggtggcaaatgcaagtgtgaagaacatggaggttgtcagagatcagataaaggtccttggaaggatcccaccacaataaagagggtcctgaatggcgaggcaaactacgacagacaaatcgtgaccatatcaggcactgatggcaagatcatcagttatgctaggccacagcgcccaaatggaaagggcagtgatgcatctgctgagtctgggtctgaagtggaagatgttacatctcctattgcaccaaagaccctcataacgaatccttctttgacccctgttcatgaggagtcaaaatttgcagcacatgcatccacgtctgctgctcgccccactattgaagaaagcatccctgttgttgacaaggttgtggacgacggatggagcagccccagagctagtccagtgtcctcttcctcaggttcattatccttgagaaatctaccgaccacattcgaaggaattcggaccttggttgtcgcatggctgacagtcttcatcgtgaccttttcgccatgcttcgaagtatcccgagcaaaatggcaaaagntctcgaacaatccatgatcacgacactattacgtggactgcctcaagacaagatncaaggaggantccgactcgttcctgccccggctanacgagaaggaaccttcaacccngnaanacgcnagtaactgagnnaagncaagcctnaaaaaccaccagatcatcanaagggggtgcatctcncccctnngacctgaaccantatntaaagag

SEQ ID NO: 356 - protein, 335 aa, Triticum aestivum
EVMKYYPQFYHGVDKDGRPVYVELIGKVDANKVLQVTTIDRYVKYHVKEFEKCFQMRFPACSIAAKRHLDSCTTILDVQGVGLKNFSKCARELITRLQKIDSDNYPETLCRMYIINAGQGFKMLWGTIKSFLDSKTASKIHVLGTKYQNKLLEIIDESELPEFFGGKCKCEEHGGCQRSDKGPWKDPTTIKRVLNGEANYDRQIVTISGTDGKIISYARPQRPNGKGSDASAESGSEVEDVTSPIAPKTLITNPSLTPVHEESKFAAHASTSAARPTIEESIPVVDKVVDDGWSSPRASPVSSSSGSLSLRNLPTTFEGIRTLVVAWLTVFIVTF

SEQ ID NO: 357 - DNA, 1747 bp, Triticum aestivum
gcacgaggtttgagagagcattccgtgagaagtttcctgcctgctcaattgctgctcaaaagcatatagatacaacaaccacaatattggatgtccatggcgtgggctggaagaactttggtaagattgcaagggatttagtgcgctgtatgcagaaaatagatggtgactattatcctgagacactacatcaaatgttcattgtaaatgctggagctggtttcaaactgatctggagcactataaagggacttcttgaccccaaaacatcatcaaaaattcatgttctaggagcaaaataccagagcaggcttcttgaagctattgacgcaagccaattaccagagttttttggtggtttgtgcacatgctctaaccagggaggatgcctgaggtccaacaaaggcccttggagtgaccctttaattatgaagatagtacatagcatggaatcatctgcattaagggatatcgtgcaagtatctgatatagaagaaacaattacaggctctgttagaatgcgtgcgcccaagttaccaaaaagaattaatgatacatcaaatgccgaatcaaggtcaaatgttgatgatcttggatcccctgtagcccctgaagatgttgaatatcatagtttggctccaatccgtgaggaagccagggaatcaggatcaacaatatacggctgttcagacgatcgacctctttcagtggataaagctgttgagtccaataaaagatataaccttactggaaatgtattaaggcagtacaacacacgacaaaattcatcgatgaatagagttttgcctgagccaggtcgtgccccaaatgtccgtgaaggcgatgcagatgatgggattttgaaattattttcaagaaaagttcttgctgtaattctcaaagtactctctcttttgcgcttgttcactcgccatcagcaacacttggaaaatgttcatccgcatactgcagccgtacccagtaatcaaccaaatcttcagatagttaaggaagaccgagtaaatccttgtttggagcgtcttgaaagacttgagtcgatgtgtaatcaactcagcagaaagcctcctgagatcccacaggataaggatcgtgctatacaggattcttttgataggataaaatccattgaatttgacctggagaagacaaagaaggtattgcatgcaacagtgatcaaacaaatgcagatggctgaaacattggagtccgtgacagagtctggtcatcatagaagaaggaaattttgtacttaataaactcacagcaatgtacatgaacaagaaaaaaaaacagagatggcgactttgatgactgctttccgacagaaactaaacagcattgctttgtatatggctgctcagtctcgcttctctttttggtcaatcaaaaagatgggtgatgttaataagaaggatagatagttggtgaccggaggaaaactgaggggatggtcaagaagagcgccctggaagataactgaatatagcgaagataactgaatatagcgcggcttatatacagcaaaagaaagttgaaagatgaatcccgacgcacagctcatgttctttgtatgttttctgttttctctgcctctatgcgcctcctgatctgctgtatgcctgtatttgaatgcttatgcgcattttcattgtcagaacagttgaggctggggtctcataattaacaccattctttggttaaaaaaaaaaaaaaaaaaaaaaaaaaa

SEQ ID NO: 358 - protein, 423 aa, Triticum aestivum
TRFERAFREKFPACSIAAQKHIDTTTTILDVHGVGWKNFGKIARDLVRCMQKIDGDYYPETLHQMFIVNAGAGFKLIWSTIKGLLDPKTSSKIHVLGAKYQSRLLEAIDASQLPEFFGGLCTCSNQGGCLRSNKGPWSDPLIMKIVHSMESSALRDIVQVSDIEETITGSVRMRAPKLPKRINDTSNAESRSNVDDLGSPVAPEDVEYHSLAPIREEARESGSTIYGCSDDRPLSVDKAVESNKRYNLTGNVLRQYNTRQNSSMNRVLPEPGRAPNVREGDADDGILKLFSRKVLAVILKVLSLLRLFTRHQQHLENVHPHTAAVPSNQPNLQIVKEDRVNPCLERLERLESMCNQLSRKPPEIPQDKDRAIQDSFDRIKSIEFDLEKTKKVLHATVIKQMQMAETLESVTESGHHRRRKFCT

SEQ ID NO: 359 - DNA, 475 bp, Triticum aestivum
  unsure (36)
  unsure (285)
  unsure (298)
  unsure (368)
  unsure (440)
  unsure (463)
  unsure (475)
ctccacccgaggggagaaggaaaagaaagctccggnctcgcccctgcctgcctgcctgcctgctgtcccaagccccaagccaagattccctcgttgcatcggcgtaaatagcgccattccaacgcgggctccgagctggtgtccaagaagttgaatttggaggagaaaatgtcggtgatccatgccgacgacatcgagatatcgctgtgcgacggcaactcggaggacgagcgccgccgccggaagatagggtcgctgcgccgcaaggccatccacgcgctcaanaagcgcggcaggngtcgcgtcgacttccgcttcccgccgggcatctccatcgaggacgtccgcgaagccgaggaggagcgcgncgtctccgccttccgtgagcgtctgggcgcgcacgggctcctggccgacaaagcacgaagaactaacaaatnatgctaaaggtcttgaaggctangaaagttcgacn

SEQ ID NO: 360 - protein, 89 aa, Triticum aestivum
  UNSURE (39)
  UNSURE (44)
  UNSURE (67)
MSVIHADDIEISLCDGNSEDERRRRKIGSLRRKAIHALXKRGRXRVDFRFPPGISIEDVREAEEERXVSAFRERLGAHGLLADKARRTN

SEQ ID NO: 361 - DNA, 424 bp, Triticum aestivum
  unsure (323)
  unsure (350)
  unsure (352)
  unsure (361)
  unsure (364)
  unsure (366)
  unsure (371)
  unsure (378)
  unsure (383)
  unsure (387)
  unsure (391)
  unsure (404)
gcatcctgctcgttccgtaccatcgtccgagctccgccgcctccgcggggcctcgccggggccaggagatcagtccgctgctgcagcaggccgctcccgcaggcgcctccacatccaagctcgtcctggaggtgaaagagaggctcgaaagggagcatccgggcctcccgacgggcaggagcggcagggatgacgacgagatgatcctctggttcttgaaggacaggaagttcgccgtcgacgaagccgtctccaagctggccaaggccatcaaatggcgtcaggatttccgcttgtcagaatatcagaagaatcagtgaaanggtttacaaacttgcaaggatatgtgnanattttttanatnancggcngcctttnttaanatantganccaaaatttcctntaaaaagaccccttaaaaag

SEQ ID NO: 362 - protein, 96 aa, Triticum aestivum
ILLVPYHRPSSAASAGPRRGQEISPLLQQAAPAGASTSKLVLEVKERLEREHPGLPTGRSGRDDDEMILWFLKDRKFAVDEAVSKLAKAIKWRQDF

SEQ ID NO: 363 - protein, 364 aa, Zea mays
MASEPVARAVAEEVGRWGSMKQTGVTLRYMMEFGSRPTQRNLLLSAQFLHKELPIRFARRALELDSLPFGLSNKPAILKVRDWYLDSFRDIRYFPEVRSRNDELAFTQMINMVKVRHNNVVPTMALGVQQLKKELGRSRKVPFEFDEIDEFLDRFYMSRIGIRMLIGQHVALHDPKPEPGVIGLINTRLSPIQVAQAACEDARSVCLREYGSAPDINIYGDPNFTFPYVTLHLHLMLFELVKNSLRAVQERYMNSDKDVPPVRIIVADGEEDVTIKVSDEGGGIPRSGLPRIFTYLYSTAKNPPELDRPNTERVTMAGYGFGLPISRLYARYFGGDLQIISMEGYGTDAYLHLSRLGDSEEPLP

SEQ ID NO: 364 - protein, 324 aa, Glycine max
MGVGSQDAIKQFQAFIDQVEEPLRTTFQNVHQGFVTETLMRFLKARDWDPCKAHKMLVDCLNWRVQNEIDNILSKPIVPADLYRAVRDSQLIGLSGYSREGLPVFAIGVGLSTFDKASVHYYVQSHIQINEYRERIILPSASKKQGRPITTCIKVLDMTGLKLSALNQIKLLTIISSIDDLNYPEKTNTYYIVNAPYIFSACWKVVKPLLQERTRRKIQVLPGCGRDELLTIMDYSSLPHFCRREGSGSSRHSESGSENCYSLDHPFHQELYNHIKQQARLREAVEPIKQGSFHVDFPVPPDDEVEIAKTIESELHKFENGNGV

SEQ ID NO: 365 - protein, 256 aa, Glycine max
MEAVRAGREGAIGLGQGDGVAKDSTETELTKIRLLRAIVETRDPSSKEEDDFMIRRFLRARDLDVEKASAMLLKYLKWRNSFVPNGSVSVSDVPNELAQDKVFMQGHDKIGRPILMVFGGRHFQNKDGLDEFKRFVVYVLDKVCASMPPGQEKFVGIAELKGWGYSNSDVRGYLSALSILQDYYPERLGKLFIVNAPYIFMKVWQIVYPFIDNKTKKKIVFVEKNKVKSTLLEEMEESQVPEIFGGSLPLVPIQDS

SEQ ID NO: 366 - protein, 142 aa, Ricinus communis
MAGVGPISQDWEPVVIRKKAPTAAAKKDEKVVNAARRAGAEIETLKKSNAGTNKAASSSTSLNTRKLDEETENLTHDRVPTELKKAIMQARMEKKFTQAQLAQMINEKPQIIQEYESGKAIPNQQIIGKLERALGVKLRGKK

SEQ ID NO: 367 - protein, 570 aa, Arabidopsis thaliana
MQSAMALSFSQTSFTRPNHVLGSSGSVFSTPRSLRFCGLRREAFGFSTSNQLAIRSNRIQFLSRKSFQVSASASSNGNGAPPKSFDYDLIIIGAGVGGHGAALHAVEKGLKTAIIEGDVVGGTCVNRGCVPSKALLAVSGRMRELQNEHHMKSFGLQVSAAGYDRQGVADHANNLATKIRNNLTNSMKAIGVDILTGFGSVLGPQKVKYGKDNIITAKDIIIATGSVPFVPKGIEVDGKTVITSDHALKLESVPEWIAIVGSGYIGLEFSDVYTALGSEVTFIEALDQLMPGFDPEISKLAQRVLINPRKIDYHTGVFASKITPARDGKPVLIELIDAKTKEPKDTLEVDAALIATGRAPFTNGLGLENVNVVTQRGFIPVDERMRVIDGKGTLVPNLYCIGDANGKLMLAHAASAQGISVVEQVSGRDHVLNHLSIPAACFTHPEISMVGLTEPQAKEKGEKEGFKVSVVKTSFKANTKALAENEGEGIAKMIYRPDNGEILGVHIFGLHAADLIHEASNAIALGTRIQDIKLAVHAHPTLSEVLDELFKAAKVESHATTRTVSEKVVV

SEQ ID NO: 368 - protein, 143 aa, Homo sapiens
MGFPEAASSFRTHQIEAVPTSSASDGFKANLVFKEIEKKLEEEGEQFVKKIGGIFAFKVKDGPGGKEATWVVDVKNGKGSVLPNSDKKADCTITMADSDFLALMTGKMNPQSAFFQGKLKITGNMGLAMKLQNLQLQPGNAKL

SEQ ID NO: 369 - protein, 181 aa, Arabidopsis thaliana
MNLEEKPTMTASRASPQAEHLYYVRCSICNTILAVGIPLKRMLDTVTVKCGHCGNLSFLTTTPPLQGHVSLTLQMQSFGGSDYKKGSSSSSSSSTSSDQPPSPSPPFVVKPPEKKQRLPSAYNRFMRDEIQRIKSANPEIPHREAFSAAAKNWAKYIPNSPTSITSGGHNMIHGLGFGEKK

SEQ ID NO: 370 - protein, 125 aa, Homo sapiens
MEPDGTYEPGFVGIRFCQECNNMLYPKEDKENRILLYACRNCDYQQEADNSCIYVNKITHEVDELTQIIADVSQDPTLPRTEDHPCQKCGHKEAVFFQSHSARAEDAMRLYYVCTAPHCGHRWTE

SEQ ID NO: 371 - protein, 239 aa, Stylosanthes hamata
MAPREKTPAVKVNAGVKEVHFRGVRKRPWGRYAAEIRDPGKKSRVWLGTFDTAEDAARAYDAAAREFRGPKAKTNFPFPDSDDINSNNNNIVVVKNNNRSPSQSSTVESSSRDRDSYSAAAAATAVADSSPLDLNLAPAGAGFAGSIRFPFQQPFAVFPGGMPAAKQALYLDAVLRASMASHGQFGFGYNRPAAAAAGAQSDSDSSSVIDLNQNEGDVAKNNGRGLVLDLNEPPPQEMA

SEQ ID NO: 372 - protein, 428 aa, Nicotiana tabacum
MNGGDMNQQQQQQQQQQQQQQQQQWMAMQQYQQQWMAMQYPAAAMAMRNDRCMVSNTCLQQHQQQQQKMQQSPTQIQSSSEDNKTIWIGDLQQWMDESYLHSCFSQAGEVISVKIIRNKQTGQSERYGFVEFNTHAAAEKVLQSYNGTMMPNAEQPFRLNWAGFSTGEKRAETGSDFSIFVGDLASDVTDTMLRDTFASRYPSLKGAKVVVDANTGHSKGYGFVRFGDESERSRAMTEMNGVYCSSRAMRIGVATPKKPSAQQQYSSQAVILSGGYASNGAATHGSQSDGDASNTTIFVGGLDSDVTDEELRQSFNQFGEVVSVKIPAGKGCGFVQFSDRSSAQEAIQKLSGAIIGKQAVRLSWGRTANKQMRADSGSQWNGGYNGRQNYGGYGYGASQNQDSGMYATGAAAYGASSNGYGNHQQPVS

SEQ ID NO: 373 - protein, 375 aa, Arabidopsis thaliana
MGTTTTTSAVYIHVIEDVVNKVREEFINNGGPGESVLSELQGIWETKMMQAGVLNGPIERSSAQKPTPGGPLTHDLNVPYEGTEEYETPTAEMLFPPTPLQTPLPTPLPGTADNSSMYNIPTGSSDYPTPGTENGVNIDVKARPSPYMPPPSPWTNPRLDVNVAYVDGRDEPERGNSNQQFTQDLFVPSSGKRKRDDSSGHYQNGGSIPQQDGAGDAIPEANFECDAFRITSIGDRKVPRDFFSSSSKIPQVDGPMPDPYDEMLSTPNIYSYQGPSEEFNEARTPAPNEIQTSTPVAVQNDIIEDDEELLNEDDDDDELDDLESGEDMNTQHLVLAQFDKVTRTKSRWKCSLKDGIMHINDKDILFNKAAGEFDF

SEQ ID NO: 374 - protein, 106 aa, Arabidopsis thaliana
MATFELYRRSTIGMCLTETLDEMVQSGTLSPELAIQVLVQFDKSMTEALESQVKTKVSIKGHLHTYRFCDNVWTFILQDAMFKSDDRQENVSRVKIVACDSKLLTQ

SEQ ID NO: 375 - protein, 617 aa, Arabidopsis thaliana
MSGPVDRFAIPCFEGILSSDEKKERKSDFENSEDERRTRIGSLKKKAINASTKFKHSLKKKRRKSDVRVSSVSIEDVRDVEELQAVDEFRQALVMEELLPHKHDDYHMMLRFLKARKFDIEKAKHMWADMIQWRKEFGTDTIIQDFQFEEIDEVLKYYPHGYHSVDKEGRPVYIERLGKVDPNKLMQVTTLDRYIRYHVKEFERSFMLKFPACTIAAKKYIDSSTTILDVQGVGLKNFTKSARELITRLQKIDGDNYPETLHQMFIINAGPGFRLLWSTVKSFLDPKTTSKIHNYSILLCFAYISDVSFICFSELPEFLGGACTCADQGGCMLSDKGPWKNPEIVKMVLHGGAHRAKQVVKVLNSDGKVIAYAKPSYPWIKGSDTSTAESGSEAEDIVVSPKAVKSYSHLRLTPVREEAKVGSGETSFAGSFAGYDEYVPMVDKAVDATWKVKPTAINRAPSKGAHMPPNVPKDHESFSARVLVTFMAFVMAILTFFRTVSNRVVTKQLPPPPSQPQIEGSAAAEEADLLNSVLKKLTELEEKIGALQSKPSEMPYEKEELLNAAVCRVDALEAELIATKKALYEALMRQEELLAYIDRQEAAQHQKKNKRKQMFCF

What is claimed is:

1. An isolated nucleic acid encoding a polypeptide selected from the group consisting of SEQ ID NOs: 2, 4, 6, 8, 10, 12, 14, 16, 18, 20, 22, 24, 26, 28, 30, 32, 34, 36, 38, 40, 42, 44, 46, 48, 50, 52, 54, 56, 58, 60, 62, 64, 66, 68, 70, 72, 74, 76, 78, 80, 82, 84, 86, 88, 90, 92, 94, 96, 98, 100, 102, 104, 106, 108, 110, 112, 114, 116, 118, 120, 122, 124, 126, 128, 130, 132, 134, 136, 138, 140, 142, 144, 146, 148, 150, 152, 154, 156, 158, 160, 162, 164, 166, 168, 170, 172, 174, 176, 178, 180, 182, 184, 186, 188, 190, 192, 194, 196, 198, 200, 202, 204, 206, 208, 210, 212, 214, 216, 218, 220, 222, 224, 226, 228, 230, 232, 234, 236, 238, 240, 242, 244, 246, 248, 250, 252, 254, 256, 258, 260, 262, 264, 266, 268, 270, 272, 274, 276, 278, 280, 282, 284, 286, 288, 290, 292, 294, 296, 298, 300, 302, 304, 306, 308, 310, 312, 314, 316, 318, 320, 322, 324, 326, 328, 330, 332, 334, 336, 338, 340, 342, 344, 346, 348, 350, 352, 354, 356, 358, 360, and 362.

2. An isolated nucleic acid comprising a member selected from the group consisting of:
(a) a polynucleotide encoding a polypeptide of at least 50 amino acids that has at least 80% identity based on the Clustal method of alignment when compared to a polypeptide of SEQ ID NO: 20;
(b) a polynucleotide encoding a polypeptide of at least 60 amino acids that has at least 95% identity based on the Clustal method of alignment when compared to a polypeptide of SEQ ID NO: 6;
(c) a polynucleotide encoding a polypeptide of at least 65 amino acids that has at least 90% identity based on the Clustal method of alignment when compared to a polypeptide of SEQ ID NO: 16;
(d) a polynucleotide encoding a polypeptide of at least 95 amino acids that has at least 90% identity based on the Clustal method of alignment when compared to a polypeptide of SEQ ID NO: 18;
(e) a polynucleotide encoding a polypeptide of at least 100 amino acids that has at least 85% identity based on the Clustal method of alignment when compared to a polypeptide of SEQ ID NO: 12;
(f) a polynucleotide encoding a polypeptide of at least 100 amino acids that has at least 90% identity based on the Clustal method of alignment when compared to a polypeptide of SEQ ID NO: 2;
(g) a polynucleotide encoding a polypeptide of at least 100 amino acids that has at least 95% identity based on the Clustal method of alignment when compared to a polypeptide of SEQ ID NO: 8;
(h) a polynucleotide encoding a polypeptide of at least 150 amino acids that has at least 90% identity based on the Clustal method of alignment when compared to a polypeptide of SEQ ID NO: 22;
(i) a polynucleotide encoding a polypeptide of at least 200 amino acids that has at least 90% identity based on the Clustal method of alignment when compared to a polypeptide of SEQ ID NO: 24;
(j) a polynucleotide encoding a polypeptide of at least 200 amino acids that has at least 95% identity based on the Clustal method of alignment when compared to a polypeptide of SEQ ID NO: 10;
(k) a polynucleotide encoding a polypeptide of at least 300 amino acids that has at least 90% identity based on the Clustal method of alignment when compared to a polypeptide of SEQ ID NO: 4;
(l) a polynucleotide encoding a polypeptide of at least 350 amino acids that has at least 85% identity based on the Clustal method of alignment when compared to a polypeptide of SEQ ID NO: 14;
(m) a polynucleotide encoding a polypeptide selected from the group consisting of SEQ ID NOs: 2, 4, 6, 8, 10, 12, 14, 16, 18, 20, 22, and 24;
(n) a polynucleotide amplified from a Zea mays, Oryza sativa, Glycine max, or Triticum aestivum nucleic acid library using primers which selectively hybridize, under stringent hybridization conditions, to loci within a polynucleotide selected from the group consisting of SEQ ID NOs: 1, 3, 5, 7, 9, 11, 13, 15, 17, 19, 21, and 23;
(o) a polynucleotide which selectively hybridizes, under stringent hybridization conditions and a wash in 2×SSC at 50° C., to a polynucleotide selected from the group consisting of SEQ ID NOs: 1, 3, 5, 7, 9, 11, 13, 15, 17, 19, 21, and 23;
(p) a polynucleotide selected from the group consisting of SEQ ID NOs: 1, 3, 5, 7, 9, 11, 13, 15, 17, 19, 21, and 23;
(q) a polynucleotide which is complementary to a polynucleotide of (a), (b), (c), (d), (e), (f), (g), (h), (i), (j), (k), (l), (m), (n), (o), or (p); and p1 (r) a polynucleotide comprising at least 25 contiguous nucleotides from a polynucleotide of (a), (b), (c), (d), (e), (f), (g), (h), (i), (j), (k), (l), (m), (n), (o), (p), or (q).

3. A recombinant expression cassette, comprising a member of claim 2 operably linked, in sense or anti-sense orientation, to a promoter.

4. A host cell comprising the recombinant expression cassette of claim 3.

5. A transgenic plant comprising a recombinant expression cassette of claim 3.

6. The transgenic plant of claim 5, wherein said plant is a monocot.

7. The transgenic plant of claim 5, wherein said plant is a dicot.

8. The transgenic plant of claim 5, wherein said plant is selected from the group consisting of: maize, soybean, sunflower, sorghum, canola, wheat, alfalfa, cotton, rice, barley, millet, peanut, and cocoa.

9. A transgenic seed from the transgenic plant of claim 5.

10. A method of modulating the level of pyruvate dehydrogenase kinase in a plant, comprising:
(a) introducing into a plant cell a recombinant expression cassette comprising a polynucleotide of claim 2 operably linked to a promoter;
(b) culturing the plant cell under plant cell growing conditions; and
(c) inducing expression of said polynucleotide for a time sufficient to modulate the level of pyruvate dehydrogenase kinase in said plant.

11. The method of claim 10, wherein the plant is a member of the group consisting of: corn, wheat, rice, and soybean.

12. An isolated protein comprising a member selected from the group consisting of:
(a) polypeptide of at least 20 contiguous amino acids from a polypeptide selected from the group consisting of SEQ ID NOs: 2, 4, 6, 8, 10, 12, 14, 16, 18, 20, 22, and 24;
(b) a polypeptide selected from the group consisting of SEQ ID NOs: 2, 4, 6, 8, 10, 12, 14, 16, 18, 20, 22, and 24;
(c) a polypeptide of at least 50 amino acids that has at least 80% identity based on the Clustal method of alignment when compared to, and having at least one epitope in common with, a polypeptide of SEQ ID NO: 20;
(d) a polypeptide of at least 60 amino acids that has at least 95% identity based on the Clustal method of alignment when compared to, and having at least one epitope in common with, a polypeptide of SEQ ID NO: 6;
(e) a polypeptide of at least 65 amino acids that has at least 90% identity based on the Clustal method of alignment when compared to, and having at least one epitope in common with, a polypeptide of SEQ ID NO: 16;
(f) a polypeptide of at least 95 amino acids that has at least 90% identity based on the Clustal method of alignment when compared to, and having at least one epitope in common with, a polypeptide of SEQ ID NO: 18;
(g) a polypeptide of at least 100 amino acids that has at least 85% identity based on the Clustal method of alignment when compared to, and having at least one epitope in common with, a polypeptide of SEQ ID NO: 12;
(h) a polypeptide of at least 100 amino acids that has at least 90% identity based on the Clustal method of alignment when compared to, and having at least one epitope in common with, a polypeptide of SEQ ID NO: 2;
(i) a polypeptide of at least 100 amino acids that has at least 95% identity based on the Clustal method of alignment when compared to, and having at least one epitope in common with, a polypeptide of SEQ ID NO: 8;
(j) a polypeptide of at least 150 amino acids that has at least 90% identity based on the Clustal method of alignment when compared to, and having at least one epitope in common with, a polypeptide of SEQ ID NO: 22;
(k) a polypeptide of at least 200 amino acids that has at least 90% identity based on the Clustal method of alignment when compared to, and having at least one epitope in common with, a polypeptide of SEQ ID NO: 24;
(l) a polypeptide of at least 200 amino acids that has at least 95% identity based on the Clustal method of alignment when compared to, and having at least one epitope in common with, a polypeptide of SEQ ID NO: 10;
(m) a polypeptide of at least 300 amino acids that has at least 90% identity based on the Clustal method of alignment when compared to, and having at least one epitope in common with, a polypeptide of SEQ ID NO: 4;
(n) a polypeptide of at least 350 amino acids that has at least 85% identity based on the Clustal method of alignment when compared to, and having at least one epitope in common with, a polypeptide of SEQ ID NO: 14; and
(o) at least one polypeptide encoded by a member of claim 2.

13. A data processing system, comprising:
a set of data representing at least one genetic sequence;
a genetic identification, analysis, or modeling computer program designed to govern the processing of said set of data;
a data processor having an output for storing or displaying data processing results, said data processor containing said data and said program and executing instructions according to said program to process said data or a contiguous subsequence thereof; and
wherein said genetic sequence is: (i) at least 90% sequence identical to a polynucleotide sequence of SEQ ID NOs: 1, 3, 5, 7, 9, 11, 13, 15, 17, 19, 21, or 23, or (ii) at least 95% sequence identical to a polypeptide sequence of SEQ ID NOs: 2, 4, 6, 8, 10, 12, 14, 16, 18, 20, 22, or 24, and wherein sequence identity is determined by a GAP algorithm under default parameters.

14. The data processing system of claim 13, wherein said genetic sequence is a contiguous subsegment of a gene or a protein sequence contained in said data processor.

15. The data processing system of claim 14, wherein said gene or said protein sequence is a genomic DNA sequence, a full-length cDNA sequence, or a polypeptide sequence.

16. The data processing system of claim 13, wherein said data processing system is a distributed system having input and output portions separated from at least some of its processing portions.

17. The data processing system of claim 16, wherein said data processing is distributed over an intranet, an internet, or both.

18. The data processing system of claim 13, wherein said program comprises at least one of: a sequence similarity application, a protein structure application, a sequence alignment application, a translation application, a O-glycosylation prediction application, or a signal peptide prediction application.

19. The data processing system of claim 13, wherein said data processor stores said data in a memory while processing the data, and wherein successive portions of said data are copied sequentially into at least one register of said data processor where said portions are processed.

20. The data processing system of claim 14, wherein said genetic sequence is created from said gene sequence or said protein sequence at runtime.

21. A data processing system having a memory and enabling identification, analysis, or modeling program to process data contained in said memory, comprising:
at least one data structure in said memory, said data structure supporting program access to data representing a genetic sequence, wherein said genetic sequence is: (i) a polynucleotide sequence of at least 90% sequence identity to a polynucleotide sequence of SEQ ID NOs: 1, 3, 5, 7, 9, 11, 13, 15, 17, 19, 21, or 23, or (ii) a polypeptide of at least 95% sequence identity to a polypeptide sequence of SEQ ID NOs: 2, 4, 6, 8, 10, 12, 14, 16, 18, 20, 22, or 24, and wherein said sequence identity is determined by the GAP algorithm under default parameters; and
at least one of said genetic identification, analysis, or modeling program in said memory, said program directing the execution of instructions by said data processing system and using said genetic sequence to identify, analyze, or model at least one data element corresponding to a logical subcomponent of said genetic sequence.

22. The data processing system of claim 21, wherein said logical sub-component of said genetic sequence is a member selected from the group consisting of restriction enzyme sites, endopeptidase sites, major grooves, minor grooves, beta-sheet, alpha helices, ORFs, 5′ UTRs, 3′ UTRs, ribosome binding sites, glycosylation sites, signal peptide domains, intron-exon junctions, poly-A signals, transcription initiation sites, translation start sites, translation termination sites, methylation sites, zinc finger domains, modified amino acid sites, preproprotein-proprotein junctions, proprotein-protein junctions, transit peptide domains, SNPs, SSRs, RFLPs, insertion elements, transmembrane spanning regions and stem-loop structures.

23. A computer implemented process for identifying, analyzing, or modeling a genetic sequence, comprising:
providing a computer memory with data representing at least one genetic sequence, wherein said genetic sequence consists essentially of: (i) a polynucleotide sequence of at least 90% sequence identity to a polynucleotide sequence of SEQ ID NOs: 1, 3, 5, 7, 9, 11, 13, 15, 17, 19, 21, or 23, or (ii) a polypeptide of at least 95% sequence identity to a polypeptide sequence of SEQ ID NOs: 2, 4, 6, 8, 10, 12, 14, 16, 18, 20, 22, or 24, wherein said sequence identity is determined by the GAP algorithm under default parameters;
providing a program to identify, analyze or model at least one logical sub-component reflecting the higher order organization of said genetic sequence;
executing said program while granting said program access to the data representing said genetic sequence; and
outputting results of said process.

24. The process of claim 23, further comprising isolating a nucleic acid comprising said genetic sequence from a nucleic acid library.

25. The process of claim 24, wherein said nucleic acid library is a full-length enriched cDNA library process.
